(19) United States
(12) Patent Application Publication
(10) Pub. No.: US 2015/0086570 A1
(43) Pub. Date: Mar. 26, 2015

(54) BIOMARKERS FOR USE IN INTEGRIN THERAPY APPLICATIONS

(71) Applicants: Biogen Idec MA Inc., Cambridge, MA (US); The Regents of the University of California, Oakland, CA (US)

(72) Inventors: Shelia M. Violette, Lexington, MA (US); Dean Sheppard, Oakland, CA (US)

(21) Appl. No.: 14/387,762

(22) PCT Filed: Mar. 15, 2013
(86) PCT No.: PCT/US13/32082

§ 371 Date: Sep. 24, 2014

Related U.S. Application Data
(60) Provisional application No. 61/617,451, filed on Mar. 29, 2012.
(60) Provisional application No. 61/648,199, filed on May 17, 2012.

(51) Int. Cl. C12Q 1/68

(52) U.S. Cl. CPC C12Q 1/6876; C12Q 2600/106; C12Q 2600/158
USPC 424/172.1; 435/7.92; 436/501; 435/6.12; 506/9; 435/6.11; 435/7.4; 435/7.21; 435/7.1; 514/44 A; 506/16; 506/18

(57) ABSTRACT

The present invention relates to biomarkers for use in determining the sensitivity of patients to therapy with αvβ6 integrin inhibition or therapy with TGF-β pathway inhibitors. The biomarker profiles disclosed herein provide individualized gene and protein profiles which will aid in treating diseases and disorders which are amenable to treatment with therapies designed against αvβ6-integrin and/or TGF-β pathway inhibitors.

### CROSS-REFERENCE TO RELATED APPLICATIONS

[0001] This application claims the benefit of priority of U.S. Provisional Application No. 61/617,451, filed Mar. 29, 2012, and U.S. Provisional Application No. 61/648,199, filed May 17, 2012, the contents of both of which are incorporated by reference herein in their entireties.

### FIELD OF THE INVENTION

[0002] The present invention relates generally to the field of pharmacogenomics, and more specifically to methods and procedures to determine drug sensitivity in patients to allow the identification of individualized genetic profiles which will aid in treating diseases and disorders which are amenable to treatment with therapies designed against αvβ6-integrin.

### BACKGROUND OF THE INVENTION

[0003] It is increasingly being realized that there is no “one-size fits all” therapy for the treatment of complex multifactorial diseases. While modern medicaments save millions of lives a year, it is well understood that any particular medication or treatment regimen may not work in a particular individual or may cause severe side effects in one individual but be adequate for the treatment of the same disorder in another individual. This has led to an ever increasing interest in pharmacogenomics as a mechanism by which to provide personalized medicine tailored to a specific individual's disease. Although conventional histological and clinical features are increasingly used to correlate with prognosis, there remains a need for providing more specific parameters by which to determine responsiveness to therapy and consequent survival of the patient.

[0004] New prognostic and predictive markers, which would facilitate an individualization of therapy for each patient, are needed to accurately predict patient response to treatments. This is particularly the case in the use of biological molecule drugs, in the clinic. The problem may be addressed by clearly identifying predictive parameters that could be used to assess a patient's sensitivity to a particular treatment regimen. The classification samples can lend a great deal of certainty to diagnosis and treatment for a specific condition and patient. By correlating molecular and genetic markers with a patient's response to a treatment, it is possible to develop new treatments in non-responding patients, to tailor the treatment regimen for the specific patient or distinguish a treatment's indication among other treatment choices because of higher confidence in the efficacy. In addition, the availability of specific biomarkers for a particular disorder will allow pre-selection of patients clinical intervention.

[0005] There are numerous microarray technologies that readily allow for the large scale characterization of gene expression patterns. Such molecular tools have made it possible to monitor the expression level of a large number of transcripts from a biological sample. Numerous studies have demonstrated that gene expression information generated by microarray analysis of human disease can predict clinical outcome. These findings bring hope that cancer treatment will be vastly improved by better predicting the response of individual tumors to therapy. Similar tactics can be employed with other disorders. Despite this promise, markers still need to be identified for their predictive value for response to a particular therapeutic regimen.

[0006] Tissue fibrosis is a pathological process characterized by the replacement of diseased tissue with excess extracellular matrix, leading to organ scarring and failure. It is a progressive process that that is promoted by epithelial injury, fibroblast activation, inflammation, and reorganization of cellular interactions with the extracellular matrix (ECM). There is a strong rationale for targeting the TGF-β pathway as a means of inhibiting fibrosis. This cytokine is central to the initiation and maintenance of fibrosis and it has been shown in a variety of tissues that blocking this pathway provides potent anti-fibrotic effects.

[0007] TGF-β is secreted as an inactive latent complex requiring activation prior to engaging its cognate receptors. A critical regulator of TGF-β activation is the αvβ6 integrin, which binds to the N-terminal region of this cytokine converting it to an activated form. αvβ6 is expressed at low or undetectable levels on normal tissue but is highly up-regulated on epithelial cells during tissue injury and fibrosis. αvβ6 has been found to be most prominently up-regulated in the kidney, lung, liver, and skin inducing tissue specific activation of TGF-β. Several studies have clearly demonstrated that blocking αvβ6 function provides potent anti-fibrotic activity by interfering with TGF-β activation and downstream signaling events.

[0008] It is proposed that the that one can monitor the response to anti-αvβ6 antibody treatment by monitoring genes that are differentially expressed in mammalian cells, tissue, or body fluids as a result of treatment with such antibodies. Likewise, we propose that one can also monitor response to anti-αvβ6 antibody treatment by monitoring protein expression changes (including post-translational modifications such as phosphorylation) in mammalian cells, tissue, or body fluids as a result of treatment with such antibodies. Transcriptional changes in gene expression, and changes in protein expression, have the potential to be used as markers of disease progression in humans and for monitoring the effectiveness of therapeutic intervention.

[0009] Despite the studies in the field that show that biomarkers would be useful for providing specific information regarding therapeutic intervention of various diseases, there still remains the need to identify specific diagnostic marker panels that allow for the tailored approach to therapy of a particular disease. There is also the need to identify biomarkers that are predictive of response to anti-fibrotic agents. The present invention is related to new methods and procedures for use in identifying patients that are responders to particular therapy to allow the development of individualized genetic profiles which are necessary to treat diseases and disorders involving intervention with an anti-αvβ6-integrin antibody based on patient response at a molecular level. This invention is also related to identifying biomarkers that can be used to monitor the response to anti-fibrotic agents and may be predictive of a clinical response to these agents.

### BRIEF SUMMARY OF THE INVENTION

[0010] The present invention identifies biomarkers that are useful in αvβ6-integrin-directed therapy.

[0011] In a first aspect, the disclosure features a method for predicting whether a human subject who has an αvβ6-mediated disorder will respond to treatment with an αvβ6-integrin inhibitor. The method involves providing a biological sample obtained from the human subject after administration of the αvβ6-integrin inhibitor and measuring the expression level of a gene or protein from Table 1 or a gene or protein from Table 2 in the biological sample. An increase in the expression level of the gene or protein from Table 1 relative to a control expression level or a decrease in the expression level of the gene or protein from Table 2 relative to a control expression level after administration of the αvβ6 integrin inhibitor, predicts that the human subject will have a clinical response, or has an increased likelihood of a clinical response, to treatment with the αvβ6-integrin inhibitor. In certain embodiments, the method further involves determining the phosphorylation status of SMAD2 protein in the biological sample. A decrease in the phosphorylation status of SMAD2 protein after administration of the αvβ6 integrin inhibitor compared to a control level is a further predictor that the human subject will have a clinical response, or has an increased likelihood of a clinical response, to treatment with the αvβ6-integrin inhibitor. In certain embodiments, the method further involves determining the expression level (e.g., mRNA, protein) in peripheral blood or bronchoalveolar lavage of one or more (e.g., one, two, three, four, five, six, seven) serum biomarkers such as, but not limited to, tissue remodeling markers (e.g., metalloproteinase 7 (MMP-7), osteopontin (OPN)); TGF-β inducible proteins (e.g., tissue inhibitor of metalloproteinase 1 (TIMP-1), collagen type 1alpha1 (CoI1A1)); and epithelial injury markers (e.g., surfactant A (SP-A), alpha defensins (DEFA1-3)). A decrease in the expression level (e.g., mRNA, protein) of one or more of the above serum biomarkers in peripheral blood is a further predictor that the human subject will have a clinical response, or has an increased likelihood of a clinical response, to treatment with the αvβ6-integrin inhibitor. In certain embodiments, the method comprises measuring any combination of at least 6 genes or proteins from Table 1, Table 2, or Tables 1 and 2. In some embodiments, a decrease in the expression level of at least one of: arachidonate 5-lipoxygenase 5 (ALOX5), fibronectin (FN1), oxidized low density lipoprotein receptor 1 (OLR1), plasminogen activator inhibitor-1 (PAI-1 also known as SERPINE1), transglutaminase 2 (TGM2), or triggering receptor expressed on myeloid cells 1 (TREM1) after administration of the αvβ6 integrin inhibitor in the biological sample is measured and predicts that the human subject will have a clinical response, or has an increased likelihood of a clinical response, to treatment with the αvβ6-integrin inhibitor. In some embodiments, the method further comprises administering to the human subject who is predicted to have a clinical response, or have an increased likelihood of a clinical response, a therapeutically effective amount of an αvβ6-integrin inhibitor.

[0012] In a second aspect, the disclosure provides a method for predicting whether a human subject who has an αvβ6-mediated disorder will respond to treatment with an αvβ6-integrin inhibitor. The method involves providing a biological sample obtained from the human subject before treatment with an αvβ6-integrin inhibitor and measuring the expression level of a gene or protein from Table 1 or Table 2 relative to a predicted control level (e.g., compare the expression level to a predicted normal value or range of values). Subjects with decreased expression of the gene or the protein from Table 1, or increased expression of the gene or the protein from Table 2, relative to a predicted control level are predicted to have a clinical response, or have an increased likelihood of a clinical response, to treatment with the αvβ6-integrin inhibitor. In certain embodiments, the method further involves determining the phosphorylation status of SMAD2 protein in the biological sample. An increase in the phosphorylation status of SMAD2 protein relative a control level is a further predictor that the human subject will have a clinical response, or has an increased likelihood of a clinical response, to treatment with the αvβ6-integrin inhibitor. In certain embodiments, the method further involves determining the expression level (e.g., mRNA, protein) in peripheral blood or bronchoalveolar lavage of one or more (e.g., one, two, three, four, five, six, seven) serum biomarkers such as, but not limited to, tissue remodeling markers (e.g., metalloproteinase 7 (MMP-7), osteopontin (OPN)); TGF-β inducible proteins (e.g., tissue inhibitor of metalloproteinase 1 (TIMP-1), collagen type 1alpha1 (CoI1A1)); and epithelial injury markers (e.g., surfactant A (SP-A), alpha defensins (DEFA1-3)). An increase in the expression level (e.g., mRNA, protein) of one or more of the above serum biomarkers in peripheral blood is a further predictor that the human subject will have a clinical response, or has an increased likelihood of a clinical response, to treatment with the αvβ6-integrin inhibitor. In certain embodiments, the method comprises measuring any combination of at least 6 genes or proteins from Table 1, Table 2, or Tables 1 and 2. In some embodiments, an increase in the expression level (e.g., mRNA or protein) of at least one of: arachidonate 5-lipoxygenase 5 (ALOX5), fibronectin (FN1), oxidized low density lipoprotein receptor 1 (OLR1), plasminogen activator inhibitor-1 (PAI-1 also known as SERPINE1), transglutaminase 2 (TGM2), or triggering receptor expressed on myeloid cells 1 (TREM1) in the biological sample is measured and predicts that the human subject will have a clinical response, or has an increased likelihood of a clinical response, to treatment with the αvβ6-integrin inhibitor. In some embodiments, the method further comprises administering to the human subject who is predicted to have a clinical response, or have an increased likelihood of a clinical response, a therapeutically effective amount of an αvβ6-integrin inhibitor.

[0013] In a third aspect, the disclosure features a method for predicting responsiveness of a human subject to treatment with an inhibitor of a TGF-β-signaling pathway. The method involves measuring the expression level of a gene or protein from Table 1 or a gene or protein from Table 2 in a first biological sample obtained from the human subject, then administering the inhibitor of a TGF-β-signaling pathway to the human subject, and finally measuring the expression level of the gene or protein from Table 1 or the gene or protein from Table 2 in a second biological sample obtained from the human subject. An increase in the level of expression of the gene or protein from Table 1 or a decrease in the level of expression of the gene or protein from Table 2 in the second biological sample compared to the level of expression of the gene or protein measured in the first biological sample predicts that the human subject will have a clinical response, or has an increased likelihood of having a clinical response, to treatment with the inhibitor of the TGF-β-signaling pathway. In some embodiments, the method comprises measuring any combination of at least 6 genes or proteins from Table 1, Table 2, or Tables 1 and 2. In some embodiments, a decrease in the expression level (e.g., mRNA or protein) of at least one of: arachidonate 5-lipoxygenase 5 (ALOX5), fibronectin (FN1), oxidized low density lipoprotein receptor 1 (OLR1), plasminogen activator inhibitor-1 (PAI-1 or SERPINE1), transglutaminase 2 (TGM2), or triggering receptor expressed on myeloid cells 1 (TREM1) in the biological sample is measured and predicts that the human subject will have a clinical response, or has an increased likelihood of having a clinical response, to treatment with the inhibitor of a TGF-β-signaling pathway. In certain embodiments, the method further involves determining the phosphorylation status of SMAD2 protein in the first and second biological samples. A decrease in the phosphorylation status of SMAD2 protein in the second biological sample compared to the first biological sample is a further predictor that the human subject will respond, or has an increased likelihood of responding, to treatment with the inhibitor of a TGF-β-signaling pathway. In certain embodiments, the method further involves determining the expression level (e.g., mRNA, protein) in peripheral blood or bronchoalveolar lavage of one or more (e.g., one, two, three, four, five, six, seven) serum biomarkers such as, but not limited to, tissue remodeling markers (e.g., metalloproteinase 7 (MMP-7), osteopontin (OPN)); TGF-β inducible proteins (e.g., tissue inhibitor of metalloproteinase 1 (TIMP-1), collagen type 1alpha1 (CoI1A1)); and epithelial injury markers (e.g., surfactant A (SP-A), alpha defensins (DEFA1-3)). A decrease in the expression level of one or more of the above serum biomarkers predicts that the human subject will have a clinical response, or has an increased likelihood of having a clinical response, to treatment with the inhibitor of a TGF-β-signaling pathway.

[0014] In a fourth aspect, the disclosure provides methods of treating an αvβ6-mediated disorder in a human subject in need thereof. The method comprises administering to the human subject a therapeutically effective amount of an αvβ6 integrin inhibitor, wherein the human subject has been identified as having at least one of: (i) a decreased expression level of a gene or protein from Table 1 in a biological sample obtained from the human subject prior to administration of the αvβ6 integrin inhibitor, compared to a control expression level; or (ii) an increased expression level of a gene or protein from Table 2 in a biological sample obtained from the human subject prior to administration of the αvβ6 integrin inhibitor, compared to a control expression level. Alternatively, the method comprises administering to the human subject a therapeutically effective amount of an αvβ6 integrin inhibitor, wherein the human subject has previously been administered the αvβ6 integrin inhibitor and has been identified as having at least one of: (i) an increased expression level of a gene or protein from Table 1 in a biological sample obtained from the human subject after the previous administration of the αvβ6 integrin inhibitor, compared to a control expression level; or (ii) a decreased expression level of a gene or protein from Table 2 in a biological sample obtained from the human subject after the previous administration of the αvβ6 integrin inhibitor, compared to a control expression level. In certain embodiments, the method involves measuring any combination of at least 6 genes or proteins from Table 1, Table 2, or Tables 1 and 2. In certain embodiments, the method further involves identifying that the human subject has a decrease in the phosphorylation status of SMAD2 protein after administration of the αvβ6 integrin inhibitor is a further predictor that the human subject will respond, or has an increased likelihood of responding, to treatment with the αvβ6-integrin inhibitor. In certain embodiments, the method involves determining the expression level (e.g., mRNA, protein) in peripheral blood or bronchoalveolar lavage of one or more (e.g., one, two, three, four, five, six, seven) serum biomarkers such as, but not limited to, tissue remodeling markers (e.g., metalloproteinase 7 (MMP-7), osteopontin (OPN)); TGF-β inducible proteins (e.g., tissue inhibitor of metalloproteinase 1 (TIMP-1), collagen type 1alpha1 (CoI1A1)); and epithelial injury markers (e.g., surfactant A (SP-A), alpha defensins (DEFA1-3)) compared to a control expression level. In certain embodiments, the method comprises determining the expression level of at least one of: arachidonate 5-lipoxygenase 5 (ALOX5), fibronectin (FN1), oxidized low density lipoprotein receptor 1 (OLR1), plasminogen activator inhibitor-1 (PAI-1 also known as SERPINE1), transglutaminase 2 (TGM2), or triggering receptor expressed on myeloid cells 1 (TREM1) in the biological sample.

[0015] These embodiments relate to all of the above three aspects. In certain embodiments, the mRNA level of the gene is measured. In other embodiments, the expression level of the protein is measured. In certain embodiments, the biological sample is a bronchoalveolar lavage sample. In certain embodiments, the biological sample is a bronchoalveolar lavage fluid. In certain embodiments, the biological sample comprises bronchoalveolar lavage cells. In some embodiments, the biological sample is a tissue sample (e.g., lung tissue). In other embodiments, the biological sample is a bodily fluid sample (e.g., a blood sample, a serum sample, a plasma sample, a urine sample).

[0016] These embodiments relate to the first, second, and fourth aspects. In some embodiments, the αvβ6-mediated disorder is fibrosis, psoriasis, sclerosis, cancer, acute and chronic lung injury, acute and chronic renal injury, acute and chronic liver injury, scleroderma, transplant, or Alports Syndrome. In some embodiments, the αvβ6-mediated disorder is lung fibrosis or kidney fibrosis. In one embodiment, the αvβ6-mediated disorder is interstitial lung disease with usual interstitial pneumonia (UIP). In certain embodiments, the αvβ6-mediated disorder is idiopathic pulmonary fibrosis, radiation induced fibrosis, bleomycin induced fibrosis, asbestos induced fibrosis, flu induced fibrosis, coagulation induced fibrosis, or vascular injury induced fibrosis. In one embodiment, the αvβ6-mediated disorder is acute lung injury. In another embodiment, the αvβ6-mediated disorder is acute kidney injury. In some embodiments, the αvβ6-mediated disorder is a cancer selected from the group consisting of a pancreatic cancer, a lung cancer, a breast cancer, a colorectal cancer, a head and neck cancer, an esophageal cancer, a skin cancer, a prostate cancer, and an endometrial cancer. In certain embodiments, the αvβ6-integrin inhibitor is an anti-αvβ6-integrin antibody. For example, the anti-αvβ6-integrin antibody can have the same CDRs as an antibody produced by a hybridoma selected from the group consisting of: 6.1A8 (ATCC accession number PTA-3647); hybridoma 6.3G9 (ATCC accession number PTA-3649); 6.8G6 (ATCC accession number PTA-3645); 6.2E5 (ATCC accession number PTA-3897); 6.2B1 (ATCC accession number PTA-3646); hybridoma 7.1G10 (ATCC accession number PTA-3898); 7.7G5 (ATCC accession number PTA-3899); and hybridoma 7.1C5 (ATCC accession number PTA-3900). In some embodiments, the anti-αvβ6-integrin antibody has the same CDRs as the antibody produced by the hybridoma deposited as 6.3G9 (ATCC accession number PTA-3649), except that the light chain CDR 1 contains an asparagine to serine substitution such that the light chain CDR 1 sequence is the sequence of SASSSVSSSYLY (SEQ ID NO:1196). In certain embodiments, the anti-αvβ6-integrin antibody comprises a heavy chain variable region comprising the amino acid sequence set forth in SEQ ID NO: 1210. In a specific embodiment, the anti-αvβ6-integrin antibody further comprises a light chain variable region comprising the amino acid sequence set forth in SEQ ID NO: 1211.

[0017] The “control expression level” is the expression level of the gene or protein of interest prior to administration of the anti-αvβ6-integrin inhibitor, or a pre-determined cut-off value. A cut-off value is typically an expression level of a gene (or protein), or ratio of the expression level of a gene (or protein) with the expression level of another gene (or protein) (e.g., an internal control such as a housekeeping gene), above or below which is considered predictive of responsiveness of a subject to a treatment comprising anti-αvβ6-integrin inhibitor or a TGF-β pathway inhibitor. Thus, in accordance with the methods described herein, a reference expression level of a gene (e.g., a gene depicted in Table 1 or 2) is identified as a cut-off value, above or below of which is predictive of responsiveness to a therapy comprising anti-αvβ6-integrin inhibitor (or a TGF-β pathway inhibitor). Some cut-off values are not absolute in that clinical correlations can still remain significant over a range of values on either side of the cutoff; however, it is possible to select an optimal cut-off value (e.g. varying H-scores) of expression levels of genes for a particular sample types. Cut-off values determined for use in the methods described herein can be compared with, e.g., published ranges of expression levels but can be individualized to the methodology used and patient population. It is understood that improvements in optimal cut-off values could be determined depending on the sophistication of statistical methods used and on the number and source of samples used to determine reference level values for the different genes and sample types. Therefore, established cut-off values can be adjusted up or down, on the basis of periodic re-evaluations or changes in methodology or population distribution. The reference expression level of one or more genes (or proteins) can be determined by a variety of methods. The reference level can be determined by comparison of the expression level of a gene (or protein) of interest in, e.g., populations of subjects (e.g., patients) that are responsive to a therapy comprising anti-αvβ6-integrin inhibitor (or a TGF-β pathway inhibitor), or not responsive to this therapy. This can be accomplished, for example, by histogram analysis, in which an entire cohort of patients are graphically presented, wherein a first axis represents the expression level of a gene (or protein) and a second axis represents the number of subjects in the cohort whose sample contain one or more expression levels at a given amount. Determination of the reference expression level of a gene (or protein) can then be made based on an amount which best distinguishes these separate groups. The reference level can be a single number, equally applicable to every subject, or the reference level can vary, according to specific subpopulations of subjects. For example, older subjects can have a different reference level than younger subjects for the same αvβ6-mediated disorder. In addition, a subject with more advanced disease (e.g., a more advanced form of an αvβ6-mediated disorder) can have a different reference value than one with a milder form of the disease.

[0018] In a fifth aspect, the disclosure features a biomarker panel comprising a probe for each of ALOX5, FN1, OLR1, SERPINE1, TGM2, and TREM1 and no additional genes other than one or more of the genes listed in Table 1 and Table 2. In certain embodiments, the probe is a nucleotide probe. In some embodiments, the probe is a protein probe. In some embodiments, the probe is an antibody or an antigen-binding fragment thereof.

[0019] In some aspects, the invention provides a method for predicting clinical responsiveness to an anti-αvβ6-integrin antibody, a small molecule inhibitor of αvβ6-integrin, or a micrRNA or siRNA of αvβ6-integrin, in a mammal having a disease, wherein the method comprises:

[0020] a) measuring the mRNA expression or protein level of the biomarkers from Table 1 in a tissue, bodily fluid or cell sample from said mammal, wherein an increase in the expression of mRNA or protein level of said biomarkers from Table 1 relative to a predetermined expression mRNA or protein level of said biomarkers in such a tissue, bodily fluid, or cell sample in response to treatment with said antibody, small molecule, microRNA or siRNA predicts an increased likelihood the mammal will respond clinically to said method of treatment with said antibody, small molecule inhibitor, microRNA or siRNA; and/or

[0021] b) measuring the mRNA expression or protein level of biomarkers from Table 2 in a tissue, bodily fluid, or cell sample from said mammal, wherein a decrease in the expression of mRNA or protein level of said biomarker relative to a predetermined expression of mRNA or protein level of said biomarker in such a tissue, bodily fluid or cell sample in response to treatment with said antibody, small molecule, microRNA or siRNA predicts an increased likelihood the mammal will respond clinically to said method of treatment with said antibody, small molecule inhibitor, microRNA, or siRNA.

[0022] More specifically, the method may comprise measuring any combination of at least 6 genes from Tables 1 and 2.

[0023] In addition, it may also be desirable to include the further step of determining the phosphorylation status of SMAD2 protein in said sample, wherein a decrease in that phosphorylation status in response to administration of an αvβ6-integrin inhibitor is indicative of inhibition of TGFβ activity.

[0024] In specific embodiments, the methods further comprise the step of measuring the expression or protein level of at least one additional biomarker selected from Table 1, wherein an increase in expression of mRNA or protein level of said biomarker in cells, tissue, or bodily fluid in response to administering said antibody is indicative of an increased likelihood that the mammal will respond clinically to said therapy.

[0025] More particularly, the methods described herein at least comprise the determination of a decrease in expression of mRNA or protein level of at least one of ALOX5, FN1, OLR1, SERPINE1, TGM2, TREM1, ENPP1, IGSF2, or GPR82 in cells, tissue, or bodily fluid as being predictive of said mammal's response to said therapy. In one embodiment, the method comprises determining a decrease in expression of an mRNA or a protein level of at least one, at least two, at least three, at least four, at least five, or six of the following: ALOX5, FN1, OLR1, SERPINE1, TGM2, and, TREM1.

[0026] Also contemplated are methods of selecting a test subject as a candidate to receive treatment with an anti-αvβ6-integrin antibody or a small molecule inhibitor of αvβ6-integrin wherein the method comprises:

[0027] a) determining the expression of mRNA or protein level of a plurality of biomarkers from Table 1 and Table 2 in a cell, bodily fluid or tissue sample from a test subject to be treated with said anti-αvβ6-integrin antibody or a small molecule inhibitor of αvβ6-integrin and

[0028] b) comparing the expression of mRNA or protein level of the biomarkers from Table 1 and Table 2 obtained in step (a) with either (i) the expression of mRNA or protein level of those biomarkers in a healthy subject and/or (ii) the expression of mRNA or protein level of said biomarkers from a subject known to be responsive to said therapy; and

[0029] c) selecting the test subject as a candidate to receive said treatment if either (i) said subject has a decreased expression of mRNA or protein level of the biomarkers of Table 1 or an increased expression of mRNA or protein level of the biomarkers in Table 2 as compared to a healthy subject, or (ii) if said subject has expression of mRNA or protein level of the biomarkers comparable to the levels of those biomarkers in subjects known to have fibrosis that is responsive to said therapy.

[0030] Additional embodiments of methods of selecting a subject for the therapies as described herein may comprise determining the phosphorylation status of SMAD2 protein in said sample, wherein an elevated level of SMAD2 phosphorylation status as compared to the SMAD2 phosphorylation status of healthy subjects is indicative that said subject will be responsive to said therapy.

[0031] In exemplary embodiments, the methods comprise measuring any combination of at least 6 biomarkers from Tables 1 and 2. In additional embodiments, the methods further comprise the step of measuring the expression of mRNA or protein level of at least one additional biomarker selected from Table 1, wherein a decrease in expression of mRNA or protein level of said biomarker in cells, tissue, or bodily fluid of said test subject as compared to a healthy subject is indicative that said subject will be responsive to said therapy. More specifically, in such methods of selecting a candidate for therapy, the methods involve monitoring the increase in expression of mRNA or protein level of at least one of ALOX5, FN1, OLR1, SERPINE1, TGM2, TREM1, ENPP1, IGSF2, or GPR82 in cells, tissue, or bodily fluid, which if measured as compared to the level of expression of said genes in said subject is indicative that said subject will be responsive to said therapy. In one embodiment, in such methods of selecting a candidate for therapy, the methods involve monitoring the increase in expression of an mRNA or a protein level of at least one, at least two, at least three, at least four, at least five, or all six of: ALOX5, FN1, OLR1, SERPINE1, TGM2, or TREM1.

[0032] In the methods described herein a particularly preferred sample is a bronchoalveolar lavage sample.

[0033] In other embodiments, the sample is a tissue sample.

[0034] In still other embodiments, the sample is a blood sample.

[0035] In still other embodiments, the sample is a bodily fluid (e.g., blood, serum, plasma, or urine).

[0036] The subject being treated or selected is preferably a subject having or suspected of having a disorder selected from the group consisting of fibrosis, psoriasis, sclerosis, cancer, acute and chronic lung injury, acute and chronic renal injury, acute and chronic liver injury, scleroderma, transplant or Alports Syndrome. In one embodiment, the subject has or is suspected of having lung fibrosis. In a particular embodiment, the subject has or is suspected of having idiopathic pulmonary fibrosis (IPF). In one embodiment, the subject has or is suspected of having kidney fibrosis. In another embodiment, the subject has or is suspected of having liver fibrosis. In another embodiment, the subject has or is suspected of having flu induced fibrosis, coagulation induced fibrosis, or vascular injury induced fibrosis. In one embodiment, the subject has or is suspected of having acute lung injury. In one embodiment, the subject has or is suspected of having acute kidney injury. In one embodiment, the subject has or suspected of having one of: a pancreatic cancer, a lung cancer, a breast cancer, a colorectal cancer, a head and neck cancer, an esophageal cancer, a skin cancer, a prostate cancer, or an endometrial cancer.

[0037] In preferred embodiments of predicting the responsiveness of a subject to therapy, the methods involve the step of measuring at least one additional biomarker selected from Table 2, wherein a decrease in expression of mRNA or protein level of said biomarker in cells, tissue, or bodily fluid in response to administering said −αvβ6 inhibitor is indicative of an increased likelihood that the mammal will respond clinically to said therapy. Alternatively, or in addition, the method may further comprise the step of measuring at least one additional biomarker selected from Table 1, wherein an increase in expression of mRNA or protein level of said biomarker in cells, tissue, or bodily fluid in response to administering said antibody is indicative of an increased likelihood that the mammal will respond clinically to said therapy.

[0038] In preferred embodiments of selecting a candidate for therapy, the methods may further comprise the step of measuring at least one additional biomarker selected from Table 2, wherein an increase in expression of mRNA or protein level of said biomarker in cells, tissue, or bodily fluid as compared to the expression of said biomarker in a healthy subject is indicative of an increased likelihood that the subject will respond clinically to said therapy. Alternatively, or in addition, the methods may further comprising the step of measuring at least one additional biomarker selected from Table 1, wherein a decrease in expression of mRNA or protein level of said biomarker in cells, tissue, or bodily fluid as compared to the expression of said biomarker in a healthy subject is indicative of an increased likelihood that the subject will respond clinically to said therapy.

[0039] In embodiments in which the subject has lung fibrosis, the disease may be selected from the group consisting of idiopathic pulmonary fibrosis, radiation induced fibrosis, chronic obstructive pulmonary disease (COPD), scleroderma, bleomycin induced fibrosis, chronic asthma, silicosis, asbestos induced fibrosis, acute lung injury, and acute respiratory distress.

[0040] In embodiments, wherein the subject has acute respiratory distress, the disease is selected from the group consisting of bacterial pneumonia induced acute respiratory distress, trauma induced acute respiratory distress, viral pneumonia induced acute respiratory distress, ventilator induced acute respiratory distress, non-pulmonary sepsis induced acute respiratory distress, aspiration induced acute respiratory distress, and interstitial lung disease with usual interstitial pneumonia (UIP).

[0041] The subject may be any mammal including, e.g., a mammal selected from the group consisting of: human, rat, mouse, dog, rabbit, pig, sheep, cow, horse, cat, primate, and monkey.

[0042] In the methods described herein the therapy may be with an antibody, wherein said antibody is selected from the group consisting of a monoclonal, polyclonal or single chain antibody.

[0043] In exemplary embodiments, the antibody has the same CDRs as a murine antibody produced by hybridoma 6.1A8 (ATCC accession number PTA-3647); hybridoma 6.3G9 (ATCC accession number PTA-3649); 6.8G6 (ATCC accession number PTA-3645); hybridoma 6.2B1 (ATCC accession number PTA-3646); hybridoma 7.1G10 (ATCC accession number PTA-3898); 7.7G5 (ATCC accession number PTA-3899); hybridoma 2E5 (ATCC accession number PTA-3897); or hybridoma 7.1C5 (ATCC accession number PTA-3900).

[0044] More specifically, the antibody has the same CDRs as murine antibody deposited as hybridoma 6.3G9 (ATCC accession number PTA-3649).

[0045] In some embodiments, the antibody has CDRs having three or fewer, two or fewer, or one amino acid substitution(s) in CDR 1 and/or CDR2, and/or CDR3 of a murine antibody produced by hybridoma 6.1A8 (ATCC accession number PTA-3647); hybridoma 6.3G9 (ATCC accession number PTA-3649); 6.8G6 (ATCC accession number PTA-3645); hybridoma 6.2B1 (ATCC accession number PTA-3646); hybridoma 7.1G10 (ATCC accession number PTA-3898); 7.7G5 (ATCC accession number PTA-3899); hybridoma 2E5 (ATCC accession number PTA-3897); or hybridoma 7.1C5 (ATCC accession number PTA-3900). In certain embodiments, the amino acid substitution(s) are conservative amino acid substitution(s).

[0046] In other embodiments, the antibody has the same CDRs as the murine antibody produced by hybridoma 6.3G9 (ATCC accession number PTA-3649) except that the light chain CDR 1 contains an asparagine to serine substitution such that the light chain CDR 1 sequence is the sequence of SASSSVSSSYLY (SEQ ID NO:1196).

[0047] In still other embodiments, the antibody has:

[0048] a) a heavy chain sequence comprising the sequence of GFTFSRYVMS (SEQ ID NO: 1178) as heavy chain CDR 1, SISSGGRMYYPDTVKG (SEQ ID NO:1185) as heavy chain CDR 2, and GSIYDGYYVFPY (SEQ ID NO: 1191) as heavy chain CDR 3;

[0049] b) a light chain sequence comprising the sequence of SANSSVSSSYLY (SEQ ID NO: 1197) or SASSSVSSSYLY (SEQ ID NO:1196) as light chain CDR 1, STSNLAS (SEQ ID NO:1202) as light chain CDR 2 and HQWSTYPPT (SEQ ID NO:1206) as light chain CDR 3.

[0050] In still further embodiments, the antibody is a humanized antibody, a chimeric antibody, a single chain antibody or an antibody construct that is capable of binding to and blocking αvβ6-integrin and comprises at least one heavy chain variable domain and one light chain variable domain comprising each of CDR 1, CDR 2, and CDR 3 from the light chain and heavy chain as follows:

[0051] a) a heavy chain sequence comprising the sequence of GFTFSRYVMS (SEQ ID NO: 1178) as heavy chain CDR 1, SISSGGRMYYPDTVKG (SEQ ID NO:1185) as heavy chain CDR 2, and GSIYDGYYVFPY (SEQ ID NO: 1191) as heavy chain CDR 3;

[0052] b) a light chain sequence comprising the sequence of SANSSVSSSYLY (SEQ ID NO: 1197) or SASSSVSSSYLY (SEQ ID NO: 1196) as light chain CDR 1, STSNLAS (SEQ ID NO:1202) as light chain CDR 2 and HQWSTYPPT (SEQ ID NO:1206) as light chain CDR 3.

[0053] In another embodiment, the antibody can bind to and/or block αvβ6-integrin and comprises a heavy chain variable region comprising an amino acid sequence having 85%, 86%, 87%, 88%, 89% 90%, 91%, 92%, 93%, 94%, 95%, 96%, 97%, 98%, 99% or 100% identity to the amino acid sequence set forth in SEQ ID NO: 1210; and a light chain variable region comprising an amino acid sequence having 85%, 86%, 87%, 88%, 89% 90%, 91%, 92%, 93%, 94%, 95%, 96%, 97%, 98%, 99% or 100% identity to the amino acid sequence set forth in SEQ ID NO: 1211. In a specific embodiment, the antibody comprises a heavy chain variable region comprising the amino acid sequence set forth in SEQ ID NO: 1210 and a light chain variable region comprising the amino acid sequence set forth in SEQ ID NO: 1211.

[0054] In another embodiment, the antibody is a humanized antibody, a chimeric antibody, a single chain antibody or an antibody construct that is capable of binding to and blocking αvβ6-integrin and comprises at least one heavy chain variable domain and one light chain variable domain comprising each of CDR 1, CDR 2, and CDR 3 from the light chain and heavy chain as follows:

[0055] a) a heavy chain sequence comprising the sequence of SYTFTDYAMH (SEQ ID NO: 1176) as heavy chain CDR 1, VISTYYGNTNYNQKFKG (SEQ ID NO:1182) as heavy chain CDR 2, and GGLRRGDRPSLRYAMDY (SEQ ID NO: 1188) as heavy chain CDR 3;

[0056] b) a light chain sequence comprising the sequence of RASQSVSTSSYSYMY (SEQ ID NO: 1194) as light chain CDR 1, YASNLES (SEQ ID NO:1200) as light chain CDR 2 and QHNWEIPFT (SEQ ID NO:1203) as light chain CDR 3. In another embodiment, the antibody is a humanized antibody, a chimeric antibody, a single chain antibody or an antibody construct that is capable of binding to and blocking αvβ6-integrin and comprises at least one heavy chain variable domain and one light chain variable domain comprising each of CDR 1, CDR 2, and CDR 3 from the light chain and heavy chain of the antibody produced by hybridoma clone 2E5 (ATCC accession number PTA-3897).

[0057] In specific embodiments, the antibody therapy is administered at a dose of between 0.015 mg/kg/week to 10 mg/kg/week. More particularly, the dose is between 0.5 mg/kg/week and 5 mg/kg/week.

[0058] In other embodiments, the mammal is shown to have a serum concentration of level of at least 2500 μg/ml of said antibody.

[0059] Also contemplated is a method of predicting responsiveness to an αvβ6-integrin inhibitor in a mammal that has a fibrosis, wherein the method comprises:

[0060] (a) measuring the mRNA expression or protein level of biomarkers from Table 1 and Table 2 in a bronchoalveolar lavage (BAL) sample of said mammal;

[0061] (b) administering an anti-αvβ6-integrin antibody, a small molecule inhibitor of αvβ6-integrin, a siRNA inhibitor of β6-integrin expression, a miRNA inhibitor to inhibit β6-integrin expression, or a miRNA mimetic to inhibit β6-integrin expression to said mammal;

[0062] (c) following the administering step (b), measuring in a BAL sample of said mammal the mRNA expression or protein level of said biomarkers from Table 1 and Table 2,

[0063] wherein an increase in the expression of mRNA or protein level of the biomarkers of Table 1 and/or a decrease in the expression of mRNA or protein level of the biomarkers of Table 2 measured in step (c) compared to the level of said biomarkers measured in step (a) predicts an increased likelihood the mammal will respond clinically to said method of treating fibrosis. In certain embodiments, the anti-αvβ6-integrin antibody is an antibody comprising the heavy chain variable domain sequence set forth in SEQ ID NO:1210 and the light chain variable domain sequence set forth in SEQ ID NO:1211. In one embodiment, the fibrosis is lung fibrosis. In a specific embodiment, the fibrosis is IPF. In another embodiment, the fibrosis is kidney fibrosis. In another embodiment, the fibrosis is liver fibrosis.

[0064] Another method of the invention is for selecting a subject that has fibrosis as a candidate for therapy with an αvβ6-integrin inhibitor wherein the method comprises:

[0065] (a) measuring the mRNA expression or protein level of the biomarkers from Table 1 and Table 2 in a bronchoalveolar lavage (BAL) sample of said subject;

[0066] (b) comparing the mRNA expression or protein levels measured in step (a) with either (i) the expression of mRNA or protein level of those biomarkers in a healthy subject and/or (ii) with the expression of mRNA or protein level of those biomarkers from subjects known to have fibrosis that is responsive to said therapy; and

[0067] c) selecting the test subject as a candidate to receive said treatment if said subject has either (i) a decreased expression mRNA or protein level of the biomarkers of Table 1 or an increased expression of mRNA or protein level of the biomarkers in Table 2 as compared to a healthy subject or (ii) if said subject has expression mRNA or protein level of the biomarkers comparable to the levels of those biomarkers in subjects known to have fibrosis that is responsive to said therapy.

[0068] In still additional embodiments, the present application contemplates a method for predicting responsiveness to an inhibitor of a TGFβ-signaling pathway in a mammal, wherein the method comprises:

[0069] (a) measuring the mRNA expression or protein level of biomarkers from Table 1 and Table 2 in a tissue, bodily fluid or cell sample of said mammal;

[0070] (b) administering said inhibitor of TGFβ signaling pathway;

[0071] (c) following the administering step (b), measuring in said sample of said mammal the mRNA expression or protein level of said biomarkers from Table 1 and Table 2,

wherein an increase in the level of expression of the markers of Table 1 and/or a decrease in the level of expression of the markers of Table 2 measured in step (c) compared to the level of said biomarkers measured in step (a) predicts an increased likelihood the mammal will respond clinically to said inhibitor of TGFβ-signaling pathway.

[0072] Also contemplated herein is a method for selecting a treatment regimen for therapy with a αvβ6 integrin inhibitor in a subject, the method comprising:

[0073] a) assaying the subject for expression of mRNA or protein level of one or more biomarkers predictive of responsiveness to a αvβ6 integrin inhibitor for treatment of the disorder; and

[0074] b) selecting a treatment regimen with a αvβ6 integrin inhibitor based upon expression of mRNA or protein level of the one or more biomarkers in the subject.

[0075] A further aspect of the invention contemplates a method of treating a subject having a disorder with a αvβ6 integrin inhibitor, the method comprising:

[0076] a) assaying the subject for expression of mRNA or protein level of one or more biomarkers predictive of responsiveness to a αvβ6 integrin inhibitor for treatment of the disorder;

[0077] b) selecting a treatment regimen with a αvβ6 integrin inhibitor based upon expression of mRNA or protein level of the one or more biomarkers in the subject; and

[0078] c) administering the αvβ6 integrin inhibitor according to the treatment regimen such that the subject is treated for the disorder.

[0079] A further aspect of the invention describes a biomarker panel specifically for use in predicting the responsiveness of a subject to a particular therapeutic regimen, said biomarker panel comprising of at least ALOX5, FN1, OLR1, SERPINE1, TGM2, TREM1, ENPP1, IGSF2, and GPR82 and not more than the genes listed in Table 1 and Table 2 collectively. In one embodiment, the biomarker panel for use in predicting the responsiveness of a subject to a particular therapeutic regimen, comprises at least ALOX5, FN1, OLR1, SERPINE1, TGM2, and TREM1.

### BRIEF DESCRIPTION OF THE DRAWINGS

[0080] FIG. 1 is a graphical representation of the expression of the ratio of phosphorylated SMAD2 (pSMAD2) protein relative to total SMAD2 protein in BAL cells isolated from cynomolgus monkeys after 8-weekly doses of STX-100 treatment relative to circulating levels of STX-100 in serum after the last (8th) weekly dose of antibody (area under the curve (AUC) ug*hr/ml). Data are shown for individual animals in vehicle and 0.1, 0.3, 1.0, 3.0, and 10 mg/kg STX-100 treatment groups. pSMAD2 and total SMAD2 levels were determined by ELISA analysis.

[0081] FIG. 2A is a graphical representation of the expression of ALOX5 mRNA in BAL cells isolated from cynomolgus monkeys after 8-weekly doses of STX-100 treatment relative to circulating levels of STX-100 in serum after the last (8th) weekly dose of antibody (area under the curve (AUC) ug*hr/ml). Data are shown for individual animals in vehicle and 0.1, 0.3, 1.0, 3.0, and 10 mg/kg STX-100 treatment groups. Gene expression was determined by Taqman® gene expression analysis.

[0082] FIG. 2B is a graphical representation of the expression of OLR1 mRNA in BAL cells isolated from cynomolgus monkeys after 8-weekly doses of STX-100 treatment relative to circulating levels of STX-100 in serum after the last (8th) weekly dose of antibody (area under the curve (AUC) ug*hr/ml). Data are shown for individual animals in vehicle and 0.1, 0.3, 1.0, 3.0, and 10 mg/kg STX-100 treatment groups. Gene expression was determined by Taqman® gene expression analysis.

[0083] FIG. 2C is a graphical representation of the expression of Serpine1 mRNA in BAL cells isolated from cynomolgus monkeys after 8-weekly doses of STX-100 treatment relative to circulating levels of STX-100 in serum after the last (8th) weekly dose of antibody (area under the curve (AUC) ug*hr/ml). Data are shown for individual animals in vehicle and 0.1, 0.3, 1.0, 3.0, and 10 mg/kg STX-100 treatment groups. Gene expression was determined by Taqman® gene expression analysis.

[0084] FIG. 2D is a graphical representation of the expression of TGM2 mRNA in BAL cells isolated from cynomolgus monkeys after 8-weekly doses of STX-100 treatment relative to circulating levels of STX-100 in serum after the last (8th) weekly dose of antibody (area under the curve (AUC) ug*hr/ml). Data are shown for individual animals in vehicle and 0.1, 0.3, 1.0, 3.0, and 10 mg/kg STX-100 treatment groups. Gene expression was determined by Taqman® gene expression analysis.

[0085] FIG. 3 is a bar graph showing the expression level of Cathepsin L mRNA in mouse BAL macrophage cells following treatment with 3G9.

[0086] FIG. 4 is a bar graph showing the expression level of Legumain mRNA in mouse BAL macrophage cells following treatment with 3G9.

[0087] FIG. 5 is a bar graph showing the expression level of PAI-1 (also known as Serpine1) mRNA in mouse BAL macrophage cells following treatment with 3G9.

[0088] FIG. 6 is a bar graph showing the expression level of Osteopontin mRNA in mouse BAL macrophage cells following treatment with 3G9.

[0089] FIG. 7 is a bar graph showing the expression level of TREM-1 mRNA in mouse BAL macrophage cells following treatment with 3G9.

[0090] FIG. 8 is a bar graph showing the expression level of MMP-19 mRNA in mouse BAL macrophage cells following treatment with 3G9.

[0091] FIG. 9 is a bar graph showing the expression level of ALCAM mRNA in mouse BAL macrophage cells following treatment with 3G9.

### DETAILED DESCRIPTION OF THE INVENTION

[0092] The identification of biomarkers that will provide rapid and accessible readouts of efficacy, drug exposure, or clinical response is increasingly important in the clinical development of drug candidates. In the present invention, the inventors have identified specific biomarkers that can be used to tailor therapy with an anti αvβ6-inhibitor such as an anti αvβ6-integrin antibody in the treatment of, for example lung injury. Embodiments of the invention include measuring changes in the expression levels of specific biomarkers that are responsive to treatment with an anti αvβ6-inhibitor such as an αvβ6-integrin antibody. In one aspect, bronchoalveolar lavage samples from subjects that are to be treated with the antibody are used for biomarker analysis.

[0093] This invention provides methods for predicting responsiveness to a αvβ6-integrin inhibitor in a subject suffering from a disorder, and methods for selecting a treatment regimen with an inhibitor of αvβ6-integrin, based on expression of particular biomarkers in the subject to be treated. The invention is based, at least in part, on the observation that altered expression of particular biomarkers in a subject suffering from lung fibrosis is associated with increased or decreased responsiveness to therapy with an anti-αvβ6-integrin antibody. Microarray analysis, and other nucleic acid analyses were used to examine normal subjects and subjects suffering from fibrosis, who were categorized as being responsive to treatment with an antibody (responders) or nonresponsive to treatment with an anti-αvβ6-integrin antibody (nonresponders). While the initial determination is made based on lung fibrosis models, it is contemplated that the markers may be useful in the treatment of other diseases, including but not limited to fibrosis, psoriasis, sclerosis, cancer, acute lung injury, renal injury, liver injury, scleroderma, transplant or Alports Syndrome, and the like. A list of additional diseases that may be treated include those listed in U.S. Pat. Nos. 7,465,449, 7,943,742, 8,153,126, and 7,927,590 each incorporated herein by reference in its entirety for the disclosure therein of disease states to be treated with αvβ6-integrin antibody related therapy.

[0094] A panel of genes were identified whose expression was altered (up-regulated (Table 1) or downregulated (Table 2)) in animals treated with the antibody, demonstrating the ability of these genes to act as biomarkers for predicting responsiveness to αvβ6-integrin inhibitor treatment. In particular, ALOX5, FN1, OLR1, SERPINE1, TGM2, TREM1, ENPP1, IGSF2, and GPR82 which are each down-regulated by administration of an anti-αvβ6 integrin specific antibody were identified as particularly useful in predicting the future response to αvβ6-integrin treatment. Accordingly, in specific embodiments, the expression pattern of one or more biomarkers which particularly include one or more, two, three, four, five, six, seven, eight, or nine of the above 9 genes (e.g., ALOX5, FN1, OLR1, SERPINE1, TGM2, and TREM1) can be assessed in subjects for which αvβ6-inhibitor therapy is being considered, or subjects suffering from other disorders amenable to modulation with αvβ6-integrin inhibition therapy, to thereby predict responsiveness of the subject to such therapy and/or to aid in the selection of an appropriate treatment regimen.

[0095] As used herein, the term “treatment regimen” is intended to refer to one or more parameters selected for the treatment of a subject, e.g., with a αvβ6 integrin inhibitor, which parameters can include, but are not necessarily limited to, the type of agent chosen for administration, the dosage, the formulation, the route of administration and the frequency of administration.

[0096] Using such tissue, cell, or fluid samples to assess gene expression before and after treatment with the anti-αvβ6-integrin antibody or small molecule inhibitor therapy, the inventors identified specific biomarkers that respond to anti-αvβ6-integrin therapy or small molecule inhibitor of −αvβ6-integrin activity. These biomarkers can be employed for predicting response to one or more αvβ6-integrin modulators and indeed for modulating the effects of modulators of the TGFβ signaling pathway. In one aspect, the biomarkers of the invention are those provided in Table 1 and Table 2 and the Sequence Listing, including both polynucleotide and polypeptide sequences. The invention also includes nucleotide sequences that hybridize to the polynucleotides provided in Table 1 and Table 2. The biomarkers in Table 1 are those that were found to be up-regulated, or increased in response to administration of an anti-αvβ6-integrin antibody, and the biomarkers shown in Table 2 are downregulated or decreased in response to administration of an αvβ6-antibody.

[0097] The biomarkers have expression levels in cells that are highly correlated with sensitivity to anti-αvβ6-antibody exhibited by the cells. Hence, these biomarkers serve as useful molecular tools for predicting the likelihood of a response to inhibition of αvβ6-integrin activity, preferably with anti-αvβ6-integrin antibodies but may also be predictive of efficacy of small molecule inhibitors of αvβ6-integrin activity. As αvβ6-integrin activity has been shown to influence TGFβ signaling pathway, the biomarkers identified herein also will be useful in predicting efficacy of modulators of the TGFβ signaling pathway.

[0098] Furthermore, the biomarker expression patterns described herein also can be used in monitoring a disorder in a subject, e.g., monitoring the responsiveness of the subject to a particular therapy or assisting in the diagnosis or prognosis of the disorder (e.g., fibrosis) in the subject.

[0099] The term “predicting responsiveness to a αvβ6 integrin inhibitor”, as used herein, is intended to refer to an ability to assess the likelihood that treatment of a subject with a αvβ6 integrin inhibitor will or will not be effective in (e.g., provide a measurable benefit to) the subject. In particular, such an ability to assess the likelihood that treatment will or will not be effective typically is exercised before treatment with the αvβ6 integrin inhibitor is begun in the subject. However, it is also possible that such an ability to assess the likelihood that treatment will or will not be effective can be exercised after treatment has begun but before an indicator of effectiveness (e.g., an indicator of measurable benefit) has been observed in the subject. Thus, genes identified herein in Table 1 and Table 2 and their alterations (i.e., up-regulation or down-regulation) in response to such therapy will be useful as surrogate biomarkers for clinical efficacy of such therapy.

[0100] The term “αvβ6 integrin inhibitor” as used herein is intended to encompass agents including proteins, antibodies, antibody fragments, fusion proteins (e.g., Ig fusion proteins or Fc fusion proteins), small molecule αvβ6 integrin antagonists and similar naturally- or normaturally-occurring molecules, and/or recombinant and/or engineered forms thereof, that, directly or indirectly, inhibit αvβ6 integrin activity, such as by inhibiting interaction of αvβ6 integrin with a cell surface receptor for αvβ6 integrin, inhibiting αvβ6 integrin protein production, inhibiting αvβ6 integrin gene expression, inhibiting αvβ6 integrin secretion from cells, inhibiting αvβ6 integrin receptor signaling or any other means resulting in decreased αvβ6 integrin activity in a subject. The term “αvβ6 integrin inhibitor” also includes agents which interfere with αvβ6 integrin activity or expression. For example, particular αvβ6 integrin inhibitors may include nucleic acid or chemical based inhibitors of expression, such as for example, RNAi molecules, siRNA molecules, micro-RNA molecules (e.g., inhibitors of RNAs and mimetics of microRNA), as well as longer antisense nucleic acid molecules. Examples of αvβ6 integrin inhibitors include the antibodies described and disclosed in e.g., U.S. Pat. Nos. 7,465,449, 7,943,742, 8,153,126, and 7,927,590 each incorporated herein by reference in its entirety for the disclosure therein of specific antibodies and variants thereof, modulators of αvβ6 integrin activity, and related methods of production.

[0101] The term “antibody” as referred to herein includes whole antibodies and any antigen binding fragment (i.e., “antigen-binding portion”) or single chains thereof. An “antibody” refers to a glycoprotein comprising at least two heavy (H) chains and two light (L) chains inter-connected by disulfide bonds, or an antigen binding portion thereof. Each heavy chain is comprised of a heavy chain variable region (abbreviated herein as VH) and a heavy chain constant region. The heavy chain constant region is comprised of three domains, CH1, CH2 and CH3. Each light chain is comprised of a light chain variable region (abbreviated herein as VL) and a light chain constant region. The light chain constant region is comprised of one domain, CL. The VH and VL regions can be further subdivided into regions of hypervariability, termed complementarity determining regions (CDR), interspersed with regions that are more conserved, termed framework regions (FR). Each VH and VL is composed of three CDRs and four FRs, arranged from amino-terminus to carboxy-terminus in the following order: FR1, CDR1, FR2, CDR2, FR3, CDR3, FR4. The variable regions of the heavy and light chains contain a binding domain that interacts with an antigen. The constant regions of the antibodies may mediate the binding of the immunoglobulin to host tissues or factors, including various cells of the immune system (e.g., effector cells) and the first component (Clq) of the classical complement system. Preferred sequences for the CDRs of the antibodies for use in the present invention include those described in U.S. Pat. No. 7,465,449. For example, the CDR sequences are as follows:

TABLE A

| Antibody | Amino Acid Sequence | SEQ ID NO |
|---|---|---|
| Heavy Chain CDR1 | | |
| 8G6 | SYTFTDYAMH | 1176 |
| 1A8 | SYTFTDYTMH | 1177 |
| 2BI | GFTFSRYVMS | 1178 |
| 3G9 | GFTFSRYVMS | 1178 |
| 2AI | GYDFNNDLIE | 1180 |
| 2G2 | GYAFTNYLIE | 1181 |
| Heavy Chain CDR2 | | |
| 8G6 | VISTYYGNTNYNQKFKG | 1182 |
| 1A8 | VIDTYYGKTNYNQKFEG | 1183 |
| 2BI | SISSG-GSTYYPDSVKG | 1184 |
| 3G9 | SISSG-GRMYYPDTVKG | 1185 |
| 2AI | VINPGSGRTNYNEKFKG | 1186 |
| 2G2 | VISPGSGHNYNEKFKG | 1187 |
| Heavy Chain CDR3 | | |
| 8G6 | GGLRRGDRPSLRYAMDY | 1188 |
| 1A8 | GGFRRGDRPSLRYAMDS | 1189 |
| 2BI | GAIYDG ----- YYVFAY | 1190 |
| 3G9 | GSIYDG ----- YYVFPY | 1191 |
| 2AI | IYYGPH ----- SYAMDY | 1192 |
| 2G2 | ID-YSG ----- PYAVDD | 1193 |
| Light Chain CDR 1 | | |
| 8G6 | RASQSVSTSS-YSYMY | 1194 |
| 1A8 | RASQSVSIST-YSYIH | 1195 |
| 2BI | SASSSVSSS ----- YLY | 1196 |
| 3G9 | SANSSVSSS ----- YLY | 1197 |
| 2AI | KASLDVRTAVA | 1198 |
| 2G2 | KASQAVNTAVA | 1199 |
| Light Chain CDR 2 | | |
| 8G6 | YASNLES | 1200 |
| 1A8 | YASNLES | 1200 |
| 2BI | STSNLAS | 1202 |
| 3G9 | STSNLAS | 1202 |
| 2AI | SASYRYT | 1179 |
| 2G2 | SASYQYT | 1201 |
| Light Chain CDR 3 | | |
| 8G6 | QHNWEIPFT | 1203 |
| 1A8 | QHSWEIPYT | 1204 |
| 2BI | HQWSSYPPT | 1205 |
| 3G9 | HQWSTYPPT | 1206 |
| 2AI | QQHYGIPWT | 1207 |
| 2G2 | QHHYGVPWT | 1208 |

[0102] In the above sequences, for the 8G6 heavy chain CDR 3 sequence, the sequence also may be modified in that the “R” in position 12 can for example be Q, such that the sequence is: GGLRRGDRPSLQYAMDY (SEQ ID NO:1209). Further it may be desirable in certain embodiments that the light chain CDR 1 sequence of the 3G9 antibody be modified to SASSSVSSSYLY (SEQ ID NO:1196).

[0103] The term “antigen-binding portion” of an antibody (or simply “antibody portion”), as used herein, refers to one or more fragments of an antibody that retain the ability to specifically bind to an antigen. It has been shown that the antigen-binding function of an antibody can be performed by fragments of a full-length antibody. Examples of binding fragments encompassed within the term “antigen-binding portion” of an antibody include (i) a Fab fragment, a monovalent fragment consisting of the VL, VH, CL and CH1 domains; (ii) a F(ab′) 2 fragment, a bivalent fragment comprising two Fab fragments linked by a disulfide bridge at the hinge region; (iii) a Fd fragment consisting of the VH and CH1 domains; (iv) a Fv fragment consisting of the VL and VH domains of a single arm of an antibody, (v) a dAb fragment, which consists of a VH domain; and (vi) an isolated complementarity determining region (CDR). Furthermore, although the two domains of the Fv fragment, VL and VH, are coded for by separate genes, they can be joined, using recombinant methods, by a synthetic linker that enables them to be made as a single protein chain in which the VL and VH regions pair to form monovalent molecules (known as single chain Fv (scFv). Such single chain antibodies are also intended to be encompassed within the term “antigen-binding portion” of an antibody. Also encompassed within the term “antigen-binding portion” of an antibody are sc(Fv)2 and diabodies. These antibody fragments are obtained using conventional techniques known to those with skill in the art, and the fragments are screened for utility in the same manner as are intact antibodies.

[0104] The terms “monoclonal antibody” or “monoclonal antibody composition” as used herein refer to a preparation of antibody molecules of single molecular composition. A monoclonal antibody composition displays a single binding specificity and affinity for a particular epitope.

[0105] The terms “chimeric antibody” or “chimeric monoclonal antibody” are intended to refer to antibodies in which the variable region sequences are derived from one species and the constant region sequences are derived from another species, such as an antibody in which the variable region sequences are derived from a mouse antibody and the constant region sequences are derived from a human antibody. Such “chimeric antibodies” can be prepared by standard recombinant technology well established in the art. For example, a nucleic acid encoding a VH region from a mouse antibody can be operatively linked to a nucleic acid encoding the heavy chain constant regions from a human antibody and, likewise, a nucleic acid encoding a VL region from a mouse antibody can be operatively linked to a nucleic acid encoding the light chain constant region from a human antibody.

[0106] The terms “humanized antibody” or “humanized monoclonal antibody” are intended to refer to antibodies in which CDR sequences derived from the germline of a non-human mammalian species, such as a mouse, have been grafted onto human framework sequences. Additional framework region modifications may be made within the human framework sequences. Such “humanized antibodies” can be prepared by standard recombinant technology well established in the art. For example, nucleic acids encoding the CDR1, CD2 and CDR3 regions from a VH region of a mouse antibody can be operatively linked to nucleic acids encoding the FR1, FR2, FR3 and FR4 regions of a human VH region, and the entire “CDR-grafted” VH region can be operatively linked to nucleic acid encoding the heavy chain constant regions from a human antibody. Likewise, nucleic acids encoding the CDR1, CD2 and CDR3 regions from a VL region of a mouse antibody can be operatively linked to nucleic acids encoding the FR1, FR2, FR3 and FR4 regions of a human VL region, and the entire “CDR-grafted” VL region can be operatively linked to nucleic acid encoding the light chain constant region from a human antibody. Preferred humanized antibodies for use in the present invention are described in U.S. Pat. No. 7,943,742. Preferably, the humanized antibody used in the methods of the invention is one that comprises the heavy and light chain CDRs 1, 2, and 3 from murine antibody 3G9. More preferably, the light chain CDR1 of murine antibody 3G9 is employed in the humanized antibody, wherein the humanized 3G9 antibody contains a light chain variable domain wherein the CDR1 region contains an asparagine (N) to serine (S) substitution at residue 3 of CDR 1 of the light chain (SEQ ID NO:1197 showing wild-type sequence of light chain CDR 1, whereas the humanized sequence would be: SASSSVSSSYLY (SEQ ID NO:1196). An exemplary such humanized antibody (referred to herein as STX-100) for use in the present invention is an antibody that has a heavy chain sequence of:

(SEQ ID NO: 1210)
EVQLVESGGGLVQPGGSLRLSCAASGFTFSRYWMSWVRQAPGK
GLEWVASISSGGRMYYPDTVKGRFTISRDNAKNSLYLQMNSLRAED
TAVYYCARGSIYDGYYVFPYWGQGTLVTVSS

and a light chain sequence of:

(SEQ ID NO: 1211)
EIVLTQSPATLSLSPGERATLSCS
ASSSVSSSYLYWYQQKPGQAPRLLI
YSTSNLASGIPARFSGSGSGTDFTL
TISSLEPEDFAVYYCHQWSTYPPTF
GGGTKVEIK

The biomarker profiles identified herein also may be used to identify mammals that will be responsive to small molecule inhibitors of αvβ6-integrin. It should be understood that small molecules can have any molecular weight. They are merely called small molecules because they typically have molecular weights less than 450 daltons. Small molecules include compounds that are found in nature as well as synthetic compounds. In one embodiment, the αvβ6-integrin-modulator or modulator of TGFβ signaling (see e.g., Akhurst, Curr. Opin. Investig. Drugs, 7 (6):513-21 (2006); Hawinkels, Growth Factors, 29 (4):140-52 (2011) is a small molecule that inhibits the growth of tumor cells that express αvβ6-integrin. In another embodiment, the small molecule is one that inhibits the growth of refractory tumor cells that express αvβ6-integrin.

[0107] As used herein, the term “biomarker” is intended to encompass a substance that is used as an indicator of a biologic state and includes genes (and nucleotide sequences of such genes), mRNAs (and nucleotide sequences of such mRNAs) and proteins (and amino acid sequences of such proteins) and post-translationally modified forms of proteins (i.e. phosphorylated and non-phosphorylated forms). A “biomarker expression pattern” is intended to refer to a quantitative or qualitative summary of the expression of one or more biomarkers in a subject, such as in comparison to a standard or a control.

[0108] The terms “increased” or “increased expression” and “decreased” or “decreased expression”, with respect to the expression pattern of a biomarker(s), are used herein as meaning that the level of expression is increased or decreased relative to a constant basal level of expression of a household, or housekeeping, gene, whose expression level does not significantly vary under different conditions. A non-limiting example of such a household, or housekeeping, gene is GAPDH. Other suitable household, or housekeeping, genes are well-established in the art.

[0109] The invention includes individual biomarkers and biomarker sets having both diagnostic and prognostic value in disease areas which are amenable to treatment with an agent that inhibits αvβ6-integrin activity, an anti-αvβ6-integrin antibody or a modulator of TGFβ signaling. The biomarker sets comprise a plurality of biomarkers such as, for example, a plurality of the biomarkers provided in Table 1 and Table 2 that are highly correlated with sensitivity or efficacy to one or more αvβ6-integrin modulators, such as αvβ6-integrin-specific antibodies.

[0110] The biomarkers and biomarker sets of the invention can be used to predict or provide a prognosis of the likely effect of one or more αvβ6-integrin modulators in different biological systems or for cellular responses. The biomarkers and biomarker sets can be used in in vitro assays of αvβ6 antibodies response by test cells to predict in vivo outcome. In accordance with the invention, the various biomarkers and biomarker sets described herein, or the combination of these biomarker sets with other biomarkers or markers, can be used, for example, to predict how patients with an αvβ6-integrin related disease might respond to therapeutic intervention with one or more αvβ6-integrin-specific antibodies.

[0111] A biomarker and biomarker set of cellular gene expression patterns correlating with sensitivity or resistance of cells following exposure of the cells to one or more αvβ6-specific antibodies provides a useful tool for screening one or more tissue or cell samples from a subject before treatment with the αvβ6-integrin specific antibodies. The screening allows a prediction of cells of a patient's sample exposed to one or more αvβ6-integrin-specific antibodies, based on the expression results of the biomarker and biomarker set, as to whether or not the biological sample, and hence a patient harboring a disease such as, e.g., fibrosis (e.g., IPF), psoriasis, sclerosis, cancer, acute lung injury, liver injury, scleroderma, transplant, or Alports Syndrome, will or will not respond to treatment with the αvβ6-integrin-specific antibodies.

[0112] The biomarker or biomarker set can also be used to monitor the progress of disease treatment or therapy in those patients undergoing treatment for a disease involving an αvβ6-integrin-specific antibody.

[0113] The biomarkers also serve as targets for the development of therapies for disease treatment. Such targets may be particularly applicable to treatment of lung fibrosis. Indeed, because these biomarkers are differentially expressed in samples that are sensitive and resistant to therapy, the expression patterns of these biomarkers are correlated with relative intrinsic sensitivity of cells to treatment with αvβ6-integrin-specific antibodies.

[0114] The level of biomarker protein and/or mRNA can be determined using methods well known to those skilled in the art. For example, quantification of protein can be carried out using methods such as ELISA, 2-dimensional SDS PAGE, Western blot, immunopreciptation, immunohistochemistry, fluorescence activated cell sorting (FACS), or flow cytometry. Quantification of mRNA can be carried out using methods such as PCR, array hybridization, sequencing, Northern blot, in-situ hybridization, dot-blot, Taqman, or RNAse protection assay.

[0115] Microarrays.

[0116] The invention also includes specialized microarrays, e.g., oligonucleotide microarrays or cDNA microarrays, comprising one or more biomarkers of Table 1 and Table 2, showing expression profiles that correlate with increased or decreased expression in response to αvβ6-integrin-specific antibodies. Such microarrays can be employed in in vitro assays for assessing the expression level of the biomarkers in the test cells from patients before and after treatment, and determining whether the expression of the biomarkers has been changed as a result of the treatment such that where expression of the biomarkers in Table 1 is increased and/or where there is a decrease in the expression of the biomarkers of Table 2 there is an indication of therapeutic efficacy of the antibody in the subject from whom the sample is isolated.

[0117] For example, a specialized microarray can be prepared using all the biomarkers, or subsets thereof (e.g., ALOX5, FN1, OLR1, PAI-1, TGM2, TREM1), as described herein and shown in Table 1 and Table 2. Cells from a tissue or organ biopsy can be isolated and exposed to one or more of αvβ6-integrin-specific antibodies. In one aspect, following application of nucleic acids isolated from both untreated and treated cells to one or more of the specialized microarrays, the pattern of gene expression of the tested cells can be determined and compared with that of the biomarker pattern from the control panel of cells used to create the biomarker set on the microarray. Based upon the gene expression pattern results from the cells that underwent testing, it can be determined if the biological sample is taken from a subject that will be responsive to the therapy using that profile of gene expression. Whether or not the tested cells from a tissue or organ biopsy will respond to one or more of the αvβ6-integrin-specific antibodies and the course of treatment or therapy can then be determined or evaluated based on the information gleaned from the results of the specialized microarray analysis.

[0118] Antibodies.

[0119] The invention also includes antibodies, including polyclonal or monoclonal, directed against one or more of the polypeptide biomarkers. Such antibodies can be used in a variety of ways, for example, to purify, detect, and target the biomarkers of the invention, including both in vitro and in vivo diagnostic, detection, screening, and/or therapeutic methods.

[0120] Kits.

[0121] The invention also includes kits for determining or predicting whether a patient would be susceptible or resistant to a treatment that comprises one or more αvβ6-integrin-specific antibodies. The patient may have a disorder such as, for example, fibrosis, psoriasis, sclerosis, cancer, acute lung injury, renal injury, liver injury, scleroderma, transplant, or Alports Syndrome. Such kits would be useful in a clinical setting for use in testing a patient's biopsied samples, for example, to determine or predict if the patient will be resistant or sensitive to a given treatment or therapy with αvβ6-integrin-specific antibodies. The kit comprises a suitable container that comprises: one or more microarrays, e.g., oligonucleotide microarrays or cDNA microarrays, that comprise those biomarkers that correlate with increased or decreased expression in response to αvβ6-integrin-specific antibodies; one or more αvβ6-integrin-specific antibodies for use in testing cells from patient tissue specimens or patient samples; and instructions for use. In addition, kits contemplated by the invention can further include, for example, reagents or materials for monitoring the expression of biomarkers of the invention at the level of mRNA or protein, using other techniques and systems practiced in the art such as, for example, RT-PCR assays, which employ primers designed on the basis of one or more of the biomarkers described herein, immunoassays, such as enzyme linked immunosorbent assays (ELISAs), immunoblotting, e.g., Western blots, or in situ hybridization, mRNA sequencing, and the like.

[0122] Application of Biomarkers and Biomarker Sets.

[0123] The biomarkers and biomarker sets may be used in different applications. A “biomarker set” can be built from any combination of biomarkers listed in Table 1 and/or Table 2 and used to make predictions about the effect of αvβ6-integrin-specific antibodies in different biological systems, for efficacy and responsiveness of lung injury to such antibodies. The various biomarkers and biomarkers sets described herein can be used, for example, as diagnostic or prognostic indicators in lung disease management, to predict how patients with such diseases might respond to therapeutic intervention with αvβ6-integrin-specific antibodies, and to predict how patients might respond to therapeutic intervention that modulates signaling through the entire TGFβ pathway.

[0124] The biomarkers have both diagnostic and prognostic value in diseases areas in which signaling through TGFβ is of importance.

[0125] In one aspect, the invention pertains to a method for predicting responsiveness to a αvβ6 integrin inhibitor in a subject having disease that would be amenable to treatment with the an anti-αvβ6 integrin antibody. Typically, the method comprises (i) assaying the subject for the expression of one or more biomarkers predictive of responsiveness to a αvβ6 integrin inhibitor in a disorder, and (ii) predicting responsiveness of the subject to the αvβ6 integrin inhibitor based on expression of the one or more biomarkers in the subject. As used herein, the term “one or more biomarkers” is intended to mean that at least one biomarker in a disclosed list of biomarkers is assayed and, in various embodiments, more than one biomarker set forth in the list may be assayed, such as two, three, four, five, ten, twenty, thirty, forty, fifty, more than fifty, or all the biomarkers in the list may be assayed. Further the diagnostic methods of the invention may be combined with assays that determine the phosphorylation status of SMAD2. Such assays would involve determination of SMAD2 phosphorylation status in response to administration of an αvβ6 integrin inhibitor wherein phosphorylation of SMAD2 is indicative of TGFβ activation and a decrease in that phosphorylation status in response to administration of an αvβ6 integrin inhibitor is indicative of inhibition of TGFβ activity. The methods described herein can further be combined with assays that determine the expression level (e.g., mRNA, protein) in peripheral blood or BAL of one or more (e.g., one, two, three, four, five, six, seven) serum biomarker such as, but not limited to, tissue remodeling markers (e.g., metalloproteinase 7 (MMP-7), osteopontin (OPN)); TGF-β inducible proteins (e.g., tissue inhibitor of metalloproteinase 1 (TIMP-1), collagen type 1alpha1 (CoI1A1)); and epithelial injury markers (e.g., surfactant A (SP-A), alpha defensins (DEFA1-3)). Blood samples for serum biomarkers can be collected prior to (baseline) and after administration (post-treatment) of the αvβ6 inhibitor (e.g., STX-100). In one embodiment, differential expression of the serum biomarkers can be measured as the difference from baseline to post-treatment value for serum biomarkers compared between αvβ6 inhibitor treated patients and placebo treated patients. A decrease in the expression of these biomarkers post-treatment is indicative that the subject will, or is highly likely to, respond to the αvβ6 inhibitor (e.g., STX-100) therapy or anti-TGFβ treatment.

[0126] In one aspect, cells or fluid from a patient, e.g., from bronchoalveolar lavage, or tissue or even a tissue biopsy, can be assayed to determine the expression pattern of one or more biomarkers prior to treatment with one or more αvβ6-integrin-specific antibodies, small molecule inhibitors of αvβ6-integrin activity, or indeed modulators of TGFβ signaling. In one aspect, the disease is for example, fibrosis (e.g., IPF), psoriasis, sclerosis, cancer (e.g., a pancreatic cancer, a lung cancer, a breast cancer, a colorectal cancer, a head and neck cancer, an esophageal cancer, a skin cancer, and an endometrial cancer), acute lung injury, renal injury, liver injury, scleroderma, transplant, or Alports Syndrome. Success or failure of a treatment can be determined based on the biomarker expression pattern of the sample from the test tissue (test cells or fluid), e.g., sample from a bronchoalveolar lavage, as being relatively similar or different from the expression pattern of a control set of the one or more biomarkers. Thus, if the test sample shows a biomarker expression profile which corresponds to that of the biomarkers in the control panel but which are increased or decreased as a result of the treatment with αvβ6-integrin specific antibody or small molecule inhibitor of αvβ6-integrin activity, it is highly likely or predicted that the individual's disease will respond favorably to treatment with the αvβ6-integrin-specific antibodies, thereby allowing the clinician to identify the subjects that are likely to be responders to the therapeutic regiment. By contrast, if the test cells show a biomarker expression pattern in which the biomarkers of Table 1 are not increased or the biomarkers or Table 2 are not decreased in response to the αvβ6-integrin antibody or small molecule inhibitor of αvβ6-integrin activity, it is highly likely or predicted that the individual will not respond to treatment with agents that are TGFβ modulators, anti-αvβ6-integrin antibodies, or small molecules that inhibit the activity of αvβ6-integrin.

[0127] The invention also provides a method of monitoring the treatment of a patient having a disease treatable by one or more αvβ6-integrin antibodies, a small molecule inhibitor of αvβ6-integrin activity or a TGFβ modulator. The isolated test cells from the patient's tissue sample, e.g., tissue or cell sample from any of the disease states mentioned herein and in specific embodiments, e.g., a BAL sample, can be assayed to determine the expression pattern of one or more biomarkers before and after exposure to the αvβ6-integrin inhibiting agent wherein, preferably, the agent is an anti-αvβ6-integrin antibody. The resulting biomarker expression profile of the test sample before and after treatment is compared with that of one or more biomarkers as described in Table 1 and whose expression is shown herein to be up-regulated in response to treatment with an anti-αvβ6-integrin antibody, and/or one or more biomarkers of Table 2 whose expression is shown to be down-regulated in response to treatment with an anti-αvβ6-integrin antibody. Thus, if a patient's response is sensitive to treatment by an anti-αvβ6-integrin antibody, based on correlation of the expression profile of the one or biomarkers up-regulated (i.e., biomarkers in Table 1) or down-regulated (i.e., biomarkers in Table 2), the patient's treatment prognosis can be qualified as favorable and treatment can continue. Also, if, after treatment with an anti-αvβ6-integrin antibody, the test sample fails to show a change in the biomarker expression profile as compared to the expression profile prior to treatment, it can serve as an indicator that the current treatment should be modified, changed, or even discontinued. This monitoring process can indicate success or failure of a patient's treatment with an anti-αvβ6-integrin antibody and such monitoring processes can be repeated as necessary or desired.

[0128] Additionally or alternatively, in certain situations it may be possible to assay for the expression of one or more biomarkers at the protein level or the post-translationally modified form of a protein (e.g. phosphorylation or non-phosphorylation), using a detection reagent that detects the protein product or phosphorylated form of a protein encoded by the mRNA of the biomarker(s). For example, if an antibody reagent is available that binds specifically to the biomarker protein product or a phosphorylated form of a protein product to be detected, and not to other proteins, then such an antibody reagent can be used to detect the expression of the biomarker of interest in a cellular, tissue, or fluid sample from the subject, or a preparation derived from the test sample, using standard antibody-based techniques known in the art, such as FACS analysis, ELISA, mass-spectrometry and the like.

[0129] As used herein, the term “subject” includes humans, and non-human animals amenable to αvβ6 integrin inhibitor therapy, e.g., preferably mammals, such as non-human primates, sheep, dogs, cats, horses and cows.

[0130] Given the observation that the expression pattern of particular biomarkers is associated with responsiveness of the subject to a αvβ6 integrin inhibitor, one can select an appropriate treatment regimen for the subject based on the expression of one or more biomarkers in the subject. Accordingly, in one embodiment, the above-described method for predicting the responsiveness to a αvβ6 integrin inhibitor in a subject further comprises selecting a treatment regimen with the αvβ6 integrin inhibitor based upon expression of the one or more biomarkers in the subject. In another aspect, the method still further comprises administering the αvβ6 integrin inhibitor to the subject according to the treatment regimen such that the disorder is inhibited in the subject.

[0131] In another embodiment, the invention provides a method for selecting a treatment regimen for therapy with a αvβ6 integrin inhibitor in a subject, the method comprising:

[0132] assaying the subject for expression of one or more biomarkers predictive of responsiveness to a αvβ6 integrin inhibitor for treatment of the disorder; and

[0133] selecting a treatment regimen with a αvβ6 integrin inhibitor based upon expression of the one or more biomarkers in the subject.

[0134] In yet another embodiment, the invention provides a method of treating a subject having a disorder with a αvβ6 integrin inhibitor (e.g., an αvβ6 antibody or a small molecule inhibitor), the method comprising:

[0135] assaying the subject for expression of one or more biomarkers predictive of responsiveness to a αvβ6 integrin inhibitor for treatment of the disorder;

[0136] selecting a treatment regimen with a αvβ6 integrin inhibitor based upon expression of the one or more biomarkers in the subject; and

[0137] administering the αvβ6 integrin inhibitor according to the treatment regimen such that the subject is treated for the disorder.

[0138] The treatment regimen that is selected typically includes at least one of the following parameters and more typically includes many or all of the following parameters: the type of agent chosen for administration, the dosage, the formulation, the route of administration and/or the frequency of administration.

[0139] In one embodiment, the αvβ6 integrin inhibitor is an anti-αvβ6 integrin antibody, or antigen-binding portion thereof. For example, the anti-αvβ6 integrin antibody, or antigen-binding portion thereof, can be a humanized antibody, a chimeric antibody or a multivalent antibody.

[0140] It is well known in the art that antibody heavy and light chain CDR3 domains play an important role in the binding specificity/affinity of an antibody for an antigen. Accordingly, in another aspect, the αvβ6 integrin inhibitor used in the treatment method of the invention is a human anti-αvβ6 integrin antibody that has slow dissociation kinetics for association with αvβ6 integrin and that has light and heavy chain CDR3 domains that structurally are identical to or related to those of STX-100 (humanized 3G9) whose sequences are shown herein.

[0141] The αvβ6 integrin antibody of the invention can be modified. In some embodiments, the αvβ6 integrin antibody or antigen binding fragments thereof, is chemically modified to provide a desired effect. For example, pegylation of antibodies and antibody fragments of the invention may be carried out by any of the pegylation reactions known in the art, as described, for example, in the following references: Focus on Growth Factors 3:4-10 (1992); EP 0 154 316; and EP 0 401 384 (each of which is incorporated by reference herein in its entirety). Preferably, the pegylation is carried out via an acylation reaction or an alkylation reaction with a reactive polyethylene glycol molecule (or an analogous reactive water-soluble polymer). A preferred water-soluble polymer for pegylation of the antibodies and antibody fragments of the invention is polyethylene glycol (PEG). As used herein, “polyethylene glycol” is meant to encompass any of the forms of PEG that have been used to derivatize other proteins, such as mono (C1-C10)alkoxy- or aryloxy-polyethylene glycol.

[0142] Methods for preparing pegylated antibodies and antibody fragments of the invention will generally comprise the steps of (a) reacting the antibody or antibody fragment with polyethylene glycol, such as a reactive ester or aldehyde derivative of PEG, under conditions whereby the antibody or antibody fragment becomes attached to one or more PEG groups, and (b) obtaining the reaction products. It will be apparent to one of ordinary skill in the art to select the optimal reaction conditions or the acylation reactions based on known parameters and the desired result.

[0143] In yet another embodiment of the invention, αvβ6 integrin antibodies or fragments thereof can be altered wherein the constant region of the antibody is modified to reduce at least one constant region-mediated biological effector function relative to an unmodified antibody. To modify an antibody of the invention such that it exhibits reduced binding to the Fc receptor, the immunoglobulin constant region segment of the antibody can be mutated at particular regions necessary for Fc receptor (FcR) interactions (see e.g., Canfield, S. M. and S. L. Morrison (1991) J. Exp. Med. 173:1483-1491; and Lund, J. et al. (1991) J. Immunol. 147:2657-2662). Reduction in FcR binding ability of the antibody may also reduce other effector functions which rely on FcR interactions, such as opsonization and phagocytosis and antigen-dependent cellular cytotoxicity.

[0144] The biomarkers of the invention will be particularly useful in predicting the responsiveness of diseases mediated by αᵥβ₆. For example, these humanized antibodies can be used to treat fibrosis (e.g., lung fibrosis, acute lung injury, kidney fibrosis, liver fibrosis, Alport's Syndrome, transplant and scleroderma), and other diseases and disorders described elsewhere herein, by blocking the activation of TGF-β through blockade of binding to the latency associated peptide (LAP) portion of TGF-β or blocking the binding of αᵥβ₆ to any other ligands, such as fibronectin, vitronectin, and tenascin. In particular, the humanized antibodies of this invention can be used to treat lung diseases associated with injury/fibrosis such as, but not limited to, idiopathic pulmonary fibrosis, radiation induced fibrosis, flu induced fibrosis, coagulation induced fibrosis, vascular injury induced fibrosis, chronic obstructive pulmonary disease (COPD), scleroderma, bleomycin induced fibrosis, chronic asthma, silicosis, asbestos induced fibrosis, acute lung injury, transplant, and acute respiratory distress, (including bacterial pneumonia induced, trauma induced, viral pneumonia induced, ventilator induced, non-pulmonary sepsis induced and aspiration induced). The biomarkers will also be useful in predicting treatment of chronic nephropathies associated with injury/fibrosis such as, but not limited to, lupus, diabetes, scleroderma, glomerular nephritis, focal segmental glomerular sclerosis, IgA nephropathy, hypertension, allograft, Alport's disease, and acute kidney injury. The humanized antibodies may also be useful to treat gut fibrosis, scleroderma, radiation-induced fibrosis. In addition, the biomarkers may be used for determining the responsiveness and predicting therapy for liver fibrosis such as, but not limited to, biliary duct injury induced fibrosis. Other indications include head and neck fibrosis, radiation induced fibrosis, corneal scarring, LASIX, corneal transplant, trabeculectomy, hypertrophic scarring, burn induced fibrosis, surgical fibrosis, sarcoidosis, psoriasis and spinal cord injury/fibrosis.

[0145] In addition to fibrotic diseases and conditions, the biomarkers may also be useful for predicting responsiveness of a subject with cancer or cancer metastasis (including tumor growth and invasion), particularly epithelial cancers, to therapy with an anti-αvβ6 or a small molecule inhibitor of αvβ6. A subset of epithelial cancers is squamous cell carcinoma, e.g., head and neck (including oral, laryngeal, pharyngeal, esophageal), breast, lung, prostate, cervical, colon, pancreatic, skin (basal cell carcinomas), prostate, and ovarian cancers. Studies have shown that αvβ6 is highly expressed in many epithelial cancers, especially on the leading edge of the tumors. The biomarkers of the invention can be used to assess whether such cancers are responsive to the αᵥβ₆ therapies. The biomarkers also could be used for predicting responsiveness of a subject with psoriasis to therapy with an anti-αvβ6 or a small molecule inhibitor of αvβ6.

### EXAMPLES

### Example 1

### Experimental Determination of Gene Expression Profiles and Phosphorylated SMAD2 Levels in BAL Cells from an 8 Week Study of Subcutaneous Injection of STX-100 (Humanized 3G9 Antibody) in Cynomolgus Monkeys

[0146] The TGF-β cytokine is central to the initiation and maintenance of fibrosis, a pathological process that is marked by the replacement of diseased tissue with excess extracellular matrix (ECM) and ultimately leads to organ scarring and failure. TGF-β promotes fibroblast proliferation and activation, leading to excess secretion of ECM and progression of the fibrotic process. TGF-β plays a well-regulated role in tissue remodeling events that take place during wound healing; however, in many diseases the process of tissue remodeling becomes aberrant and is characterized by prolonged upregulated TGF-β signaling, excess fibroblast accumulation, ECM deposition, and scarring. Elevated expression of TGF-β is a hallmark of fibrotic human tissues, and the functional importance of TGF-β in promoting tissue fibrosis has been documented in vitro and in vivo in animal disease models. Overexpression of TGF-β is sufficient to induce fibroblast activation and angiogenesis in vivo and to activate excessive production of ECM in organotypic and cell cultures. Conversely, genetic or pharmacological disruption of the TGF-β pathway protects from fibrosis in models of tissue fibrosis. Consequently, TGF-β has been identified as a therapeutic target for treatment of diseases associated with the pathology of fibrosis. This includes idiopathic pulmonary fibrosis (IPF), an interstitial lung disease characterized by chronic progressive fibrosis, where there is an increased TGF-β transcriptional signature in affected lung tissue and increased TGF-β protein levels in focal areas of fibrosis.

[0147] Monitoring TGF-β activity in bronchoalveolar lavage (BAL) cells is a means to monitor activation TGF-β activity in the lung since these cells can make intimate contact with the epithelium of the lung. BAL cells, which are largely composed of macrophages, show tonic activation of TGF-β activation as monitored by phosphorylated SMAD2 (pSMAD2) levels and the expression of TGF-β regulated genes. For instance, there is no meaningful difference in pSMAD2 levels in BAL cells isolated from wild type mice treated with TGF-β1 or from wild type mice versus bleomycin treated mice. Likewise, there is no meaningful difference in TGF-β regulated genes or pSMAD2 levels in BAL cells from healthy volunteers or IPF patients with or without TGF-β1 treatment.

[0148] Thus, evaluating changes in pSMAD2 levels and gene expression in anti-αvβ6 antibody-treated BAL cells from healthy primates provides a measure of monitoring inhibition of the TGF-β pathway. These experiments are described in greater detail below.

[0149] Cynomolgus monkeys (2 males/group and 3 females/group) received a bolus subcutaneous injection of 0 (0.9% Sodium Chloride for Injection, USP), 0.1, 0.3, 1, 3, or 10 mg/kg/dose STX-100 once weekly for 8 consecutive weeks. The dose volume was 1 mL/kg/dose for all dose groups. At the end of the treatment period, all animals were euthanized and tissues collected for possible analysis. Animals were bled prestudy and on Days 1, 7, 35, 42, 49, and on Day 50, blood samples were drawn at 12, 24, 36, 48, 72, 96, 120, 144 and 168 hours after the administration of the 8th (last) dose for pharmacokinetic analysis. Animals were also bled pretest and on Days 35, 53 and 57 for RNA isolation and gene expression analysis, and pretest and on Days 7, 35, 53 and 57 for possible serum biomarker and plasma biomarker analysis. Bronchoalveolar lavage was performed pretest and on Days 53 and 57 (termination) for RNA and gene expression analysis as well as total and differential cell counts. Parameters evaluated during the study included: viability, clinical observations and body weights.

[0150] All animals survived to termination of the study. Weekly dosing with STX-100 up to 10 mg/kg/week did not result in any effects on animal viability, clinical observations or body weight. There were noticeable variations in the trough concentrations in the 0.1 and 0.3 mg/kg dose groups. In the 0.1 mg/kg dose group, all animals had detectable concentrations of STX-100 on Day 7; however, trough concentrations following subsequent doses diminished to BQL in 3 out of 5 animals. For the 2 animals that had measurable STX-100 level in subsequent trough sampling time points, female Animal No. 8899 showed no serum exposure at trough following the 7th dose and no exposure at all was noted following the 8th dose, whereas, male animal 9281 showed serum exposure of STX-100 through the 8th dose.

[0151] Overall, serum exposures of STX-100 appeared to be higher in female than in male monkeys at 0.1, 0.3 and 1 mg/kg, but were similar at 3 and 10 mg/kg. Overall, the serum concentration profile of STX-100 in monkeys (males and females combined) increased with increasing dose.

[0152] BAL Collection:

[0153] During the study, Bronchoalveolar lavage fluid (BALF) samples were harvested under anesthesia. Animals were sedated with ketamine (5 to 10 mg/kg IM) and anesthetized with Propofol (7 mg/kg IV). Additional Propofol was administered as needed. The entire procedure took less than 30 minutes per animal. At necropsy, the side of the lung that was last lavaged (right side) was separated and the apical lobe only was lavaged with two washes of 10 mL sterile saline.

[0154] The BAL procedure was performed by guiding a bronchoscope into the left or right main (1st and 2nd collection respectively) bronchus and advancing it into a terminal bronchus until it became ‘wedged’. Two washes of sterile phosphate buffered saline (PBS) (10 mL total) was instilled and aspirated for collection into a cryotube and placed immediately on wet ice. For the pre-test collection only, the bronchoscope was repositioned to the opposite side to the initial BALF collection and the procedure was repeated. Post-dose BAL was performed on one lung lobe only and the lavaged lung side was noted. The total harvested volume was estimated and recorded. All BALF cells were processed and frozen within two hours of BALF collection. Post collection, animals were placed in lateral recumbency on the side opposite to that lavaged. Animals lavaged on both sides were switched from side to side every 5 to 10 minutes to ensure adequate recovery and excess fluid absorption in both lung lobes.

[0155] Samples were spun at 500 g for 5 minutes at 2 to 8° C. The supernatant was divided into four equal aliquots and frozen at approximately −80° C. (±10° C.). The cell pellet were resuspended in 10.5 mL of ice cold 1×PBS and then aliquoted into samples for preparing cell lysates to analyze total SMAD2 and phosphorylated SMAD2 levels by ELISA and for preparing total RNA to monitor gene expression by affymetrix gene chip analysis (Affymetrix GeneChip® Human Gene 1.0 ST arrays) or Taqman® gene expression assays.

[0156] Table 1 shows the list of genes that showed a statistically significant increase in expression in BAL cells isolated from cynomolgus monkeys after 8-weekly doses of STX-100 treatment relative to vehicle treated control animals. Gene expression was determined by affymetrix gene chip analysis (Affymetrix GeneChip® Human Gene 1.0 ST arrays).

[0157] Table 2 shows the list of genes showing a statistically significant decrease in expression in BAL cells isolated from cynomolgus monkeys after 8-weekly doses of STX-100 treatment relative to vehicle treated control animals. Gene expression was determined by affymetrix gene chip analysis (Affymetrix GeneChip® Human Gene 1.0 ST arrays).

TABLE 1
Genes Up-regulated Upon STX-100 Administration

| | | Nucleic acid | Protein |
|---|---|---|---|
| gene_assignment | Genbank No. | Seqeunce | Sequence |
| RHOU // ras homolog | NM_021205 | SEQ ID NO: 1 | SEQ ID NO: 2 |
| gene family, member U | | | |
| ASTN2 // astrotactin 2 | NM_198186 | SEQ ID NO: 3 | SEQ ID NO: 4 |
| // ITM2C // integral | NM_030926 | SEQ ID NO: 5 | SEQ ID NO: 6 |
| membrane protein 2C | | | |
| // PCOLCE2 // | NM_013363 | SEQ ID NO: 7 | SEQ ID NO: 8 |
| procollagen C- | | | |
| endopeptidase | | | |
| enhancer 2 | | | |
| // SLC39A8 // solute | NM_022154 | SEQ ID NO: 9 | SEQ ID NO: |
| carrier family 39 (zinc | | | 10 |
| transporter), member 8 | | | |
| NM_015028 // TNIK // | NM_015028 | SEQ ID NO: 11 | SEQ ID |
| TRAF2 and NCK | | | NO: 12 |
| interacting kinase | | | |
| // FUCA1 // | NM_000147 | SEQ ID NO: 13 | SEQ ID NO: |
| fucosidase, alpha-L-1, | | | 14 |
| tissue | | | |
| NM_033104 // STON2 | NM_033104 | SEQ ID NO: 15 | SEQ ID NO: |
| // stonin 2 | | | 16 |
| // GATA3 // GATA | NM_001002295 | SEQ ID NO: 17 | SEQ ID NO: |
| binding protein 3 | | | 18 |
| // GRK5 // G protein- | NM_005308 | SEQ ID NO: 19 | SEQ ID NO: |
| coupled receptor | | | 20 |
| kinase 5 | | | |
| // PLA1A // | NM_015900 | SEQ ID NO: 21 | SEQ ID NO: |
| phospholipase A1 | | | 22 |
| member A | | | |
| // ATP2B4 // ATPase, | NM_001001396 | SEQ ID NO: 23 | SEQ ID NO: |
| Ca++ transporting, | | | 24 |
| plasma membrane 4 | | | |
| // TEC // tec protein | NM_003215 | SEQ ID NO: 25 | SEQ ID NO: |
| tyrosine kinase | | | 26 |
| // LAMC1 // laminin, | NM_002293 | SEQ ID NO: 27 | SEQ ID NO: |
| gamma 1 (formerly | | | 28 |
| LAMB2) | | | |
| // TAGAP // T-cell | NM_054114 | SEQ ID NO: 29 | SEQ ID NO: |
| activation RhoGTPase | | | 30 |
| activating protein | | | |
| // CD3E // CD3e | NM_000733 | SEQ ID NO: 31 | SEQ ID NO: |
| molecule, epsilon | | | 32 |
| (CD3-TCR complex) | | | |
| // BACE2 // beta-site | NM_012105 | SEQ ID NO: 33 | SEQ ID NO: |
| APP-cleaving enzyme 2 | | | 34 |
| // TRERF1 // | NM_033502 | SEQ ID NO: 35 | SEQ ID NO: |
| transcriptional | | | 36 |
| regulating factor 1 | | | |
| // CCL5 // chemokine | NM_002985 | SEQ ID NO: 37 | SEQ ID NO: |
| (C-C motif) ligand 5 | | | 38 |
| // PLA2G2D // | NM_012400 | SEQ ID NO: 39 | SEQ ID NO: |
| phospholipase A2, | | | 40 |
| group IID | | | |
| // S1PR1 // | NM_001400 | SEQ ID NO: 41 | SEQ ID NO: |
| sphingosine-1- | | | 42 |
| phosphate receptor 1 | | | |
| // PLXNA1 // plexin A1 | NM_032242 | SEQ ID NO: 43 | SEQ ID |
| | | | NO: 44 |
| // MTSS1 // metastasis | NM_014751 | SEQ ID NO: 45 | SEQ ID NO: |
| suppressor 1 | | | 46 |
| // SLAMF7 // SLAM | NM_021181 | SEQ ID NO: 47 | SEQ ID NO: |
| family member 7 | | | 48 |
| // C11 orf49 // | NM_001003676 | SEQ ID NO: 49 | SEQ ID NO: |
| chromosome 11 open | | | 50 |
| reading frame 49 | | | |
| // CCDC103 // coiled- | NM_213607 | SEQ ID NO: 51 | SEQ ID NO: |
| coil domain containing | | | 52 |
| 103 | | | |
| // PTPN22 // protein | NM_015967 | SEQ ID NO: 53 | SEQ ID NO: |
| tyrosine phosphatase, | | | 54 |
| non-receptor type 22 | | | |
| (lymphoid) | | | |
| // PIM2 // pim-2 | NM_006875 | SEQ ID NO: 55 | SEQ ID NO: |
| oncogene | | | 56 |
| // SLAMF8 // SLAM | NM_020125 | SEQ ID NO: 57 | SEQ ID NO: |
| family member 8 | | | 58 |
| // IQGAP2 // IQ motif | NM_006633 | SEQ ID NO: 59 | SEQ ID NO: |
| containing GTPase | | | 60 |
| activating protein 2 | | | |
| // CHST15 // | NM_015892 | SEQ ID NO: 61 | SEQ ID NO: |
| carbohydrate (N- | | | 62 |
| acetylgalactosamine | | | |
| 4-sulfate 6-O) | | | |
| sulfotransferase 15 | | | |
| // MAP2K6 // mitogen- | NM_002758 | SEQ ID NO: 63 | SEQ ID NO: |
| activated protein | | | 64 |
| kinase kinase 6 | | | |
| // ALOX15 // | NM_001140 | SEQ ID NO: 65 | SEQ ID |
| arachidonate 15- | | | NO: 66 |
| lipoxygenase | | | |
| NM_020859 // | NM_020859 | SEQ ID NO: 67 | SEQ ID |
| SHROOM3 // shroom | | | NO: 68 |
| family member 3 | | | |
| // DNM1 // dynamin 1 | NM_004408 | SEQ ID NO: 69 | SEQ ID NO: |
| | | | 70 |
| // NT5DC2 // 5′- | NM_022908 | SEQ ID NO: 71 | SEQ ID |
| nucleotidase domain | | | NO: 72 |
| containing 2 | | | |
| // IFITM1 // interferon | NM_003641 | SEQ ID NO: 73 | SEQ ID NO: |
| induced | | | 74 |
| transmembrane | | | |
| protein 1 (9-27) | | | |
| // E2F5 // E2F | NM_001951 | SEQ ID NO: 75 | SEQ ID NO: |
| transcription factor 5, | | | 76 |
| p130-binding | | | |
| // AES // amino- | NM_198969 | SEQ ID NO: 77 | SEQ ID NO: |
| terminal enhancer of | | | 78 |
| split | | | |
| // USP2 // ubiquitin | NM_004205 | SEQ ID NO: 79 | SEQ ID NO: |
| specific peptidase 2 | | | 80 |
| // CD8A // CD8a | NR_027353 | SEQ ID NO: 81 | N/A |
| molecule | | | |
| // MYO1E // myosin IE | NM_004998 | SEQ ID NO: 82 | SEQ ID NO: |
| | | | 83 |
| // KREMEN1 // kringle | NM_001039570 | SEQ ID NO: 84 | SEQ ID NO: |
| containing | | | 85 |
| transmembrane | | | |
| protein 1 | | | |
| // VLDLR // very low | NM_003383 | SEQ ID NO: 86 | SEQ ID NO: |
| density lipoprotein | | | 87 |
| receptor | | | |
| // TIAM1 // T-cell | NM_003253 | SEQ ID NO: 88 | SEQ ID NO: |
| lymphoma invasion | | | 89 |
| and metastasis 1 | | | |
| // ABLIM1 // actin | NM_002313 | SEQ ID NO: 90 | SEQ ID NO: |
| binding LIM protein 1 | | | 91 |
| // TSPAN4 // | NM_001025237 | SEQ ID NO: 92 | SEQ ID NO: |
| tetraspanin 4 | | | 93 |
| // PLTP // phospholipid | NM_006227 | SEQ ID NO: 94 | SEQ ID NO: |
| transfer protein | | | 95 |
| // PSCA // prostate | NM_005672 | SEQ ID NO: 96 | SEQ ID NO: |
| stem cell antigen | | | 97 |
| // GRAP2 // GRB2- | NM_004810 | SEQ ID NO: 98 | SEQ ID NO: |
| related adaptor protein 2 | | | 99 |
| // P2RY10 // purinergic | NM_014499 | SEQ ID NO: | SEQ ID |
| receptor P2Y, G- | | 100 | NO: 101 |
| protein coupled, 10 | | | |
| // MAP1A // | NM_002373 | SEQ ID NO: | SEQ ID NO: |
| microtubule- | | 102 | 103 |
| associated protein 1A | | | |
| // THEMIS // | NM_001010923 | SEQ ID NO: | SEQ ID NO: |
| thymocyte selection | | 104 | 105 |
| associated | | | |
| // IL18RAP // | NM_003853 | SEQ ID NO: | SEQ ID NO: |
| interleukin 18 receptor | | 106 | 107 |
| accessory protein | | | |
| // CHN2 // chimerin | NM_004067 | SEQ ID NO: | SEQ ID NO: |
| (chimaerin) 2 | | 108 | 109 |
| // PPM1E // protein | NM_014906 | SEQ ID NO: | SEQ ID |
| phosphatase 1E | | 110 | NO: 111 |
| (PP2C domain | | | |
| containing) | | | |
| // TMEM154 // | NM_152680 | SEQ ID NO: | SEQ ID NO: |
| transmembrane | | 112 | 113 |
| protein 154 | | | |
| // PLBD1 // | NM_024829 | SEQ ID NO: | SEQ ID NO: |
| phospholipase B | | 114 | 115 |
| domain containing 1 | | | |
| // SCN1B // sodium | NM_001037 | SEQ ID NO: | SEQ ID NO: |
| channel, voltage- | | 116 | 117 |
| gated, type I, beta | | | |
| // UST // uronyl-2- | NM_005715 | SEQ ID NO: | SEQ ID NO: |
| sulfotransferase | | 118 | 119 |
| // IL23R // interleukin | NM_144701 | SEQ ID NO: | SEQ ID NO: |
| 23 receptor | | 120 | 121 |
| // KLRK1 // killer cell | NM_007360 | SEQ ID NO: | SEQ ID NO: |
| lectin-like receptor | | 122 | 123 |
| subfamily K, member 1 | | | |
| // NFATC2 // nuclear | NM_012340 | SEQ ID NO: | SEQ ID NO: |
| factor of activated T- | | 124 | 125 |
| cells, cytoplasmic, | | | |
| calcineurin-dependent 2 | | | |
| // FYB // FYN binding | NM_001465 | SEQ ID NO: | SEQ ID NO: |
| protein (FYB-120/130) | | 126 | 127 |
| // KMO // kynurenine | NM_003679 | SEQ ID NO: | SEQ ID NO: |
| 3-monooxygenase | | 128 | 129 |
| (kynurenine 3- | | | |
| hydroxylase) | | | |
| // MCOLN2 // | NM_153259 | SEQ ID NO: | SEQ ID NO: |
| mucolipin 2 | | 130 | 131 |
| // TMEM37 // | NM_183240 | SEQ ID NO: | SEQ ID NO: |
| transmembrane | | 132 | 133 |
| protein 37 | | | |
| // STARD13 // StAR- | NM_178006 | SEQ ID NO: | SEQ ID NO: |
| related lipid transfer | | 134 | 135 |
| (START) domain | | | |
| containing 13 | | | |
| // CD80 // CD80 | NM_005191 | SEQ ID NO: | SEQ ID NO: |
| molecule | | 136 | 137 |
| // LOC100289528 // | ENST00000438157 | SEQ ID NO: | SEQ ID NO: |
| hypothetical protein | | 998 | 138 |
| LOC100289528 | | | |
| // ARID5B // AT rich | NM_032199 | SEQ ID NO: 139 | SEQ ID NO: |
| interactive domain 5B | | | 140 |
| (MRF1-like) | | | |
| // ADD3 // adducin 3 | NM_016824 | SEQ ID NO: | SEQ ID |
| (gamma) | | 141 | NO: 142 |
| // PLCG1 // | NM_002660 | SEQ ID NO: | SEQ ID NO: |
| phospholipase C, | | 143 | 144 |
| gamma 1 | | | |
| // SNORD115-31 // | NR_003346 | SEQ ID NO: 145 | N/A |
| small nucleolar RNA, | | | |
| C/D box 115-31 | | | |
| // PYROXD2 // | NM_032709 | SEQ ID NO: | SEQ ID NO: |
| pyridine nucleotide- | | 146 | 147 |
| disulphide | | | |
| oxidoreductase | | | |
| domain 2 | | | |
| // AMICA1 // adhesion | NM_001098526 | SEQ ID NO: | SEQ ID NO: |
| molecule, interacts | | 148 | 149 |
| with CXADR antigen 1 | | | |
| // TGFBI // | NM_000358 | SEQ ID NO: | SEQ ID NO: |
| transforming growth | | 150 | 151 |
| factor, beta-induced, | | | |
| 68 kDa | | | |
| // ABI2 // abl-interactor 2 | NM_005759 | SEQ ID NO: | SEQ ID NO: |
| | | 152 | 153 |
| // SLC16A7 // solute | NM_004731 | SEQ ID NO: | SEQ ID NO: |
| carrier family 16, | | 154 | 155 |
| member 7 | | | |
| (monocarboxylic acid | | | |
| transporter 2) | | | |
| // CD3D // CD3d | NM_000732 | SEQ ID NO: | SEQ ID NO: |
| molecule, delta (CD3- | | 156 | 157 |
| TCR complex) | | | |
| // OSBPL3 // oxysterol | NM_015550 | SEQ ID NO: | SEQ ID NO: |
| binding protein-like 3 | | 158 | 159 |
| // TPCN1 // two pore | NM_001143819 | SEQ ID NO: | SEQ ID NO: |
| segment channel 1 | | 160 | 161 |
| // ECE1 // endothelin | NM_001397 | SEQ ID NO: | SEQ ID NO: |
| converting enzyme 1 | | 162 | 163 |
| // TGFA // | NM_003236 | SEQ ID NO: | SEQ ID NO: |
| transforming growth | | 164 | 165 |
| factor, alpha | | | |
| // ZEB1 // zinc finger | NR_024285 | SEQ ID NO: | N/A |
| E-box binding | | 166 | |
| homeobox 1 | | | |
| — | | | |
| // CTDSPL // CTD | NM_001008392 | SEQ ID NO: | SEQ ID NO: |
| (carboxy-terminal | | 167 | 168 |
| domain, RNA | | | |
| polymerase II, | | | |
| polypeptide A) small | | | |
| phosphatase-like | | | |
| // PPFIBP2 // PTPRF | NM_003621 | SEQ ID NO: | SEQ ID NO: |
| interacting protein, | | 169 | 170 |
| binding protein 2 (liprin | | | |
| beta 2) | | | |
| // KLRD1 // killer cell | NM_002262 | SEQ ID NO: | SEQ ID NO: |
| lectin-like receptor | | 171 | 172 |
| subfamily D, member 1 | | | |
| // GM2A // GM2 | NM_000405 | SEQ ID NO: | SEQ ID NO: |
| ganglioside activator | | 173 | 174 |
| // EIF4G3 // eukaryotic | NM_003760 | SEQ ID NO: | SEQ ID NO: |
| translation initiation | | 175 | 176 |
| factor 4 gamma, 3 | | | |
| // PADI2 // peptidyl | NM_007365 | SEQ ID NO: | SEQ ID NO: |
| arginine deiminase, | | 177 | 178 |
| type II | | | |
| // TSPAN33 // | NM_178562 | SEQ ID NO: | SEQ ID NO: |
| tetraspanin 33 | | 179 | 180 |
| // SDC3 // syndecan 3 | NM_014654 | SEQ ID NO: | SEQ ID NO: |
| | | 181 | 182 |
| // ZFP36L1 // zinc | NM_004926 | SEQ ID NO: | SEQ ID NO: |
| finger protein 36, C3H | | 183 | 184 |
| type-like 1 | | | |
| // CPM // | NM_001874 | SEQ ID NO: | SEQ ID NO: |
| carboxypeptidase M | | 185 | 186 |
| // SPP1 // secreted | NM_001040058 | SEQ ID NO: | SEQ ID NO: |
| phosphoprotein 1 | | 187 | 188 |
| // CYFIP2 // | NM_001037332 | SEQ ID NO: | SEQ ID NO: |
| cytoplasmic FMR1 | | 189 | 190 |
| interacting protein 2 | | | |
| // FLNB // filamin B, | NM_001457 | SEQ ID NO: | SEQ ID NO: |
| beta | | 191 | 192 |
| // C6orf192 // | NM_052831 | SEQ ID NO: | SEQ ID NO: |
| chromosome 6 open | | 193 | 194 |
| reading frame 192 | | | |
| // CD226 // CD226 | NM_006566 | SEQ ID NO: | SEQ ID NO: |
| molecule | | 195 | 196 |
| // RASA3 // RAS p21 | NM_007368 | SEQ ID NO: | SEQ ID NO: |
| protein activator 3 | | 197 | 198 |
| // CD274 // CD274 | NM_014143 | SEQ ID NO: | SEQ ID NO: |
| molecule | | 199 | 200 |
| // CD28 // CD28 | NM_006139 | SEQ ID NO: | SEQ ID NO: |
| molecule | | 201 | 202 |
| // KCNMA1 // | NM_001014797 | SEQ ID NO: | SEQ ID NO: |
| potassium large | | 203 | 204 |
| conductance calcium- | | | |
| activated channel, | | | |
| subfamily M, alpha | | | |
| member 1 | | | |
| NM_001259 // CDK6 // | NM_001259 | SEQ ID NO: | SEQ ID NO: |
| cyclin-dependent | | 205 | 206 |
| kinase 6 | | | |
| // ADAM19 // ADAM | NM_033274 | SEQ ID NO: | SEQ ID NO: |
| metallopeptidase | | 207 | 208 |
| domain 19 (meltrin | | | |
| beta) | | | |
| // CD3G // CD3g | NM_000073 | SEQ ID NO: | SEQ ID NO: |
| molecule, gamma | | 209 | 210 |
| (CD3-TCR complex) | | | |
| // ADORA3 // | NM_020683 | SEQ ID NO: | SEQ ID NO: |
| adenosine A3 receptor | | 211 | 212 |
| // STAT4 // signal | NM_003151 | SEQ ID NO: | SEQ ID NO: |
| transducer and | | 213 | 214 |
| activator of | | | |
| transcription 4 | | | |
| // CD86 // CD86 | NM_175862 | SEQ ID NO: | SEQ ID NO: |
| molecule | | 215 | 216 |
| // TM7SF4 // | NM_030788 | SEQ ID NO: | SEQ ID NO: |
| transmembrane 7 | | 217 | 218 |
| superfamily member 4 | | | |
| // CCL3L1 // | NM_021006 | SEQ ID NO: | SEQ ID NO: |
| chemokine (C-C motif) | | 219 | 220 |
| ligand 3-like 1 | | | |
| // CCL3L1 // | NM_021006 | SEQ ID NO: | SEQ ID NO: |
| chemokine (C-C motif) | | 221 | 222 |
| ligand 3-like 1 | | | |
| // CCL3L1 // | NM_021006 | SEQ ID NO: | SEQ ID NO: |
| chemokine (C-C motif) | | 223 | 224 |
| ligand 3-like 1 | | | |
| // TOX // thymocyte | NM_014729 | SEQ ID NO: | SEQ ID NO: |
| selection-associated | | 225 | 226 |
| high mobility group | | | |
| box | | | |
| // ITK // IL2-inducible | NM_005546 | SEQ ID NO: | SEQ ID NO: |
| T-cell kinase | | 227 | 228 |
| // SORBS2 // sorbin | NM_021069 | SEQ ID NO: | SEQ ID NO: |
| and SH3 domain | | 229 | 230 |
| containing 2 | | | |
| // PLEKHA5 // | NM_019012 | SEQ ID NO: | SEQ ID NO: |
| pleckstrin homology | | 231 | 232 |
| domain containing, | | | |
| family A member 5 | | | |
| // FAT1 // FAT tumor | NM_005245 | SEQ ID NO: | SEQ ID NO: |
| suppressor homolog 1 | | 233 | 234 |
| (Drosophila) | | | |
| // TGFBR3 // | NM_003243 | SEQ ID NO: | SEQ ID NO: |
| transforming growth | | 235 | 236 |
| factor, beta receptor III | | | |
| // SMAD3 // SMAD | NM_005902 | SEQ ID NO: | SEQ ID NO: |
| family member 3 | | 237 | 238 |
| // TUBA4A // tubulin, | NM_006000 | SEQ ID NO: | SEQ ID NO: |
| alpha 4a | | 230 | 240 |
| // SLC40A1 // solute | NM_014585 | SEQ ID NO: | SEQ ID NO: |
| carrier family 40 (iron- | | 241 | 242 |
| regulated transporter), | | | |
| member 1 | | | |
| // LEF1 // lymphoid | NM_016269 | SEQ ID NO: | SEQ ID NO: |
| enhancer-binding | | 243 | 244 |
| factor 1 | | | |
| // CCL8 // chemokine | NM_005623 | SEQ ID NO: | SEQ ID NO: |
| (C-C motif) ligand 8 | | 245 | 246 |
| // CCR4 // chemokine | NM_005508 | SEQ ID NO: | SEQ ID NO: |
| (C-C motif) receptor 4 | | 247 | 248 |
| // CDC14A // CDC14 | NM_003672 | SEQ ID NO: | SEQ ID NO: |
| cell division cycle 14 | | 240 | 250 |
| homolog A (S. cerevisiae) | | | |
| // PRKCQ // protein | NM_006257 | SEQ ID NO: | SEQ ID NO: |
| kinase C, theta | | 251 | 252 |
| // STK39 // serine | NM_013233 | SEQ ID NO: | SEQ ID NO: |
| threonine kinase 39 | | 253 | 254 |
| (STE20/SPS1 | | | |
| homolog, yeast) | | | |
| // TSPAN3 // | NM_005724 | SEQ ID NO: | SEQ ID NO: |
| tetraspanin 3 | | 255 | 256 |
| // CCDC88C // coiled- | NM_001080414 | SEQ ID NO: | SEQ ID NO: |
| coil domain containing | | 257 | 258 |
| 88C | | | |
| // PDE4D // | NM_001104631 | SEQ ID NO: | SEQ ID NO: |
| phosphodiesterase | | 259 | 260 |
| 4D, cAMP-specific | | | |
| (phosphodiesterase | | | |
| E3 dunce homolog, | | | |
| Drosophila) | | | |
| // DFNA5 // deafness, | NM_004403 | SEQ ID NO: | SEQ ID NO: |
| autosomal dominant 5 | | 261 | 262 |
| // MMP2 // matrix | NM_004530 | SEQ ID NO: | SEQ ID NO: |
| metallopeptidase 2 | | 263 | 264 |
| (gelatinase A, 72 kDa | | | |
| gelatinase, 72 kDa | | | |
| type IV collagenase) | | | |
| // GNG2 // guanine | NM_053064 | SEQ ID NO: | SEQ ID NO: |
| nucleotide binding | | 265 | 266 |
| protein (G protein), | | | |
| gamma 2 | | | |
| // ETS1 // v-ets | NM_001143820 | SEQ ID NO: | SEQ ID NO: |
| erythroblastosis virus | | 267 | 268 |
| E26 oncogene | | | |
| homolog 1 (avian) | | | |
| // P2RY12 // purinergic | NM_022788 | SEQ ID NO: | SEQ ID NO: |
| receptor P2Y, G- | | 269 | 270 |
| protein coupled, 12 | | | |
| // SLC9A9 // solute | NM_173653 | SEQ ID NO: | SEQ ID NO: |
| carrier family 9 | | 271 | 272 |
| (sodium/hydrogen | | | |
| exchanger), member 9 | | | |
| // CD180 // CD180 | NM_005582 | SEQ ID NO: | SEQ ID NO: |
| molecule | | 273 | 274 |
| // TRERF1 // | NM_033502 | SEQ ID NO: | SEQ ID NO: |
| transcriptional | | 275 | 276 |
| regulating factor 1 | | | |
| // CD1C // CD1c | NM_001765 | SEQ ID NO: | SEQ ID NO: |
| molecule | | 277 | 278 |
| // INPP4B // inositol | NM_003866 | SEQ ID NO: | SEQ ID NO: |
| polyphosphate-4- | | 279 | 280 |
| phosphatase, type II, | | | |
| 105 kDa | | | |
| // DKFZP564O0823 // | NM_015393 | SEQ ID NO: | SEQ ID NO: |
| prostatic androgen- | | 281 | 282 |
| repressed message-1 | | | |
| // STAMBPL1 // STAM | NM_020799 | SEQ ID NO: | SEQ ID NO: |
| binding protein-like 1 | | 283 | 284 |
| // ADAM23 // ADAM | NM_003812 | SEQ ID NO: | SEQ ID NO: |
| metallopeptidase | | 285 | 286 |
| domain 23 | | | |
| // SRGAP1 // SLIT- | NM_020762 | SEQ ID NO: | SEQ ID NO: |
| ROBO Rho GTPase | | 287 | 288 |
| activating protein 1 | | | |
| // TUBB2C // tubulin, | NM_006088 | SEQ ID NO: | SEQ ID NO: |
| beta 2C | | 289 | 290 |
| // CES1 // | NM_001025195 | SEQ ID NO: | SEQ ID NO: |
| carboxylesterase 1 | | 291 | 292 |
| (monocyte/macrophage | | | |
| serine esterase 1) | | | |
| // DPP4 // dipeptidyl- | NM_001935 | SEQ ID NO: | SEQ ID NO: |
| peptidase 4 | | 293 | 294 |
| // SKAP1 // src kinase | NM_003726 | SEQ ID NO: | SEQ ID NO: |
| associated | | 295 | 296 |
| phosphoprotein 1 | | | |
| // SEPP1 // | NM_005410 | SEQ ID NO: | SEQ ID NO: |
| selenoprotein P, | | 297 | 298 |
| plasma, 1 | | | |
| // KIAA0746 // | NM_015187 | SEQ ID NO: | SEQ ID NO: |
| KIAA0746 protein | | 299 | 300 |
| // CD200R1 // CD200 | NM_138806 | SEQ ID NO: | SEQ ID NO: |
| receptor 1 | | 301 | 302 |
| // ANGPTL2 // | NM_012098 | SEQ ID NO: | SEQ ID NO: |
| angiopoietin-like 2 | | 303 | 304 |
| // GZMK // granzyme | NM_002104 | SEQ ID NO: | SEQ ID NO: |
| K (granzyme 3; | | 305 | 306 |
| tryptase II) | | | |
| // SLC16A10 // solute | NM_018593 | SEQ ID NO: | SEQ ID NO: |
| carrier family 16, | | 307 | 308 |
| member 10 (aromatic | | | |
| amino acid | | | |
| transporter) | | | |
| // MARCKS // | NM_002356 | SEQ ID NO: | SEQ ID NO: |
| myristoylated alanine- | | 309 | 310 |
| rich protein kinase C | | | |
| substrate | | | |
| // C6orf105 // | NM_001143948 | SEQ ID NO: | SEQ ID NO: |
| chromosome 6 open | | 311 | 312 |
| reading frame 105 | | | |
| // CCND2 // cyclin D2 | NM_001759 | SEQ ID NO: | SEQ ID NO: |
| | | 313 | 314 |
| // GDPD1 // | NM_182569 | SEQ ID NO: | SEQ ID NO: |
| glycerophosphodiester | | 315 | 316 |
| phosphodiesterase | | | |
| domain containing 1 | | | |
| // CD38 // CD38 | NM_001775 | SEQ ID NO: | SEQ ID NO: |
| molecule | | 317 | 318 |
| // TGFB2 // | NM_001135599 | SEQ ID NO: | SEQ ID NO: |
| transforming growth | | 319 | 320 |
| factor, beta 2 | | | |
| // ARRDC4 // arrestin | NM_183376 | SEQ ID NO: | SEQ ID NO: |
| domain containing 4 | | 321 | 322 |
| // ITM2A // integral | NM_004867 | SEQ ID NO: | SEQ ID NO: |
| membrane protein 2A | | 323 | 324 |
| // SLC44A3 // solute | NM_001114106 | SEQ ID NO: | SEQ ID NO: |
| carrier family 44, | | 325 | 326 |
| member 3 | | | |
| // FGD6 // FYVE, | NM_018351 | SEQ ID NO: | SEQ ID NO: |
| RhoGEF and PH | | 327 | 328 |
| domain containing 6 | | | |
| // BIRC3 // baculoviral | NM_001165 | SEQ ID NO: | SEQ ID NO: |
| IAP repeat-containing 3 | | 329 | 330 |
| // GUCY1A3 // | NM_000856 | SEQ ID NO: | SEQ ID NO: |
| guanylate cyclase 1, | | 331 | 332 |
| soluble, alpha 3 | | | |
| // PAPSS2 // 3′- | NM_004670 | SEQ ID NO: | SEQ ID NO: |
| phosphoadenosine 5′- | | 333 | 334 |
| phosphosulfate | | | |
| synthase 2 | | | |
| // RAB6B // RAB6B, | NM_016577 | SEQ ID NO: | SEQ ID NO: |
| member RAS | | 335 | 336 |
| oncogene family | | | |
| // SLC38A1 // solute | NM_030674 | SEQ ID NO: | SEQ ID NO: |
| carrier family 38, | | 337 | 338 |
| member 1 | | | |
| // ST8SIA4 // ST8 | NM_005668 | SEQ ID NO: | SEQ ID NO: |
| alpha-N-acetyl- | | 339 | 340 |
| neuraminide alpha- | | | |
| 2,8-sialyltransferase 4 | | | |
| // WDR17 // WD | NM_170710 | SEQ ID NO: | SEQ ID NO: |
| repeat domain 17 | | 341 | 342 |
| // C4orf18 // | NM_001128424 | SEQ ID NO: | SEQ ID NO: |
| chromosome 4 open | | 343 | 344 |
| reading frame 18 | | | |
| // KLRG1 // killer cell | NM_005810 | SEQ ID NO: | SEQ ID NO: |
| lectin-like receptor | | 345 | 346 |
| subfamily G, member 1 | | | |
| // TES // testis derived | NM_015641 | SEQ ID NO: | SEQ ID NO: |
| transcript (3 LIM | | 347 | 348 |
| domains) | | | |
| // ABCA6 // ATP- | NM_080284 | SEQ ID NO: | SEQ ID NO: |
| binding cassette, sub- | | 349 | 350 |
| family A (ABC1), | | | |
| member 6 | | | |
| // CD96 // CD96 | NM_198196 | SEQ ID NO: | SEQ ID NO: |
| molecule | | 351 | 352 |
| // C5orf13 // | NM_004772 | SEQ ID NO: | SEQ ID NO: |
| chromosome 5 open | | 353 | 354 |
| reading frame 13 | | | |
| // ITGB3 // integrin, | NM_000212 | SEQ ID NO: | SEQ ID NO: |
| beta 3 (platelet | | 355 | 356 |
| glycoprotein IIIa, | | | |
| antigen CD61) | | | |
| // PLXNC1 // plexin C1 | NM_005761 | SEQ ID NO: | SEQ ID NO: |
| | | 357 | 358 |
| // NEDD4L // neural | NM_001144967 | SEQ ID NO: | SEQ ID NO: |
| precursor cell | | 359 | 360 |
| expressed, | | | |
| developmentally | | | |
| down-regulated 4-like | | | |
| // LGMN // legumain | NM_005606 | SEQ ID NO: | SEQ ID NO: |
| | | 361 | 362 |
| // SCIN // scinderin | NM_001112706 | SEQ ID NO: | SEQ ID NO: |
| | | 363 | 364 |
| // TRAT1 // T cell | NM_016388 | SEQ ID NO: | SEQ ID NO: |
| receptor associated | | 365 | 366 |
| transmembrane | | | |
| adaptor 1 | | | |
| // ANTXR2 // anthrax | NM_058172 | SEQ ID NO: | SEQ ID NO: |
| toxin receptor 2 | | 367 | 368 |
| // CCL4L1 // | NM_001001435 | SEQ ID NO: | SEQ ID NO: |
| chemokine (C-C motif) | | 369 | 370 |
| ligand 4-like 1 | | | |
| // KIAA0040 // | NM_014656 | SEQ ID NO: | SEQ ID NO: |
| KIAA0040 | | 371 | 372 |
| // MYO1D // myosin ID | NM_015194 | SEQ ID NO: | SEQ ID NO: |
| | | 373 | 374 |
| — | | | |
| // RARRES1 // retinoic | NM_206963 | SEQ ID NO: | SEQ ID NO: |
| acid receptor | | 375 | 376 |
| responder (tazarotene | | | |
| induced) 1 | | | |
| // LYVE1 // lymphatic | NM_006691 | SEQ ID NO: | SEQ ID NO: |
| vessel endothelial | | 377 | 378 |
| hyaluronan receptor 1 | | | |
| // GPR174 // G | NM_032553 | SEQ ID NO: | SEQ ID NO: |
| protein-coupled | | 379 | 380 |
| receptor 174 | | | |
| // GABRG3 // gamma- | NM_033223 | SEQ ID NO: | SEQ ID NO: |
| aminobutyric acid | | 381 | 382 |
| (GABA) A receptor, | | | |
| gamma 3 | | | |
| // FOLR2 // folate | NM_000803 | SEQ ID NO: | SEQ ID NO: |
| receptor 2 (fetal) | | 383 | 384 |
| — | | | |
| — | | | |
| // GPR171 // G | NM_013308 | SEQ ID NO: | SEQ ID NO: |
| protein-coupled | | 385 | 386 |
| receptor 171 | | | |
| // PMP22 // peripheral | NM_000304 | SEQ ID NO: | SEQ ID NO: |
| myelin protein 22 | | 387 | 388 |
| // PLD3 // | NM_012268 | SEQ ID NO: | SEQ ID NO: |
| phospholipase D | | 389 | 390 |
| family, member 3 | | | |
| // VSIG4 // V-set and | NM_007268 | SEQ ID NO: | SEQ ID NO: |
| immunoglobulin | | 391 | 392 |
| domain containing 4 | | | |
| // PTPRB // protein | NM_001109754 | SEQ ID NO: | SEQ ID NO: |
| tyrosine phosphatase, | | 393 | 394 |
| receptor type, B | | | |
| // RNF125 // ring finger | NM_017831 | SEQ ID NO: | SEQ ID NO: |
| protein 125 | | 395 | 396 |
| // TCN2 // | NM_000355 | SEQ ID NO: | SEQ ID NO: |
| transcobalamin II; | | 397 | 398 |
| macrocytic anemia | | | |
| // EPS8 // epidermal | NM_004447 | SEQ ID NO: | SEQ ID NO: |
| growth factor receptor | | 399 | 400 |
| pathway substrate 8 | | | |
| // CD84 // CD84 | NM_003874 | SEQ ID NO: | SEQ ID NO: |
| molecule | | 401 | 402 |
| // F13A1 // coagulation | NM_000129 | SEQ ID NO: | SEQ ID NO: |
| factor XIII, A1 | | 403 | 404 |
| polypeptide | | | |
| // IKZF3 // IKAROS | NM_012481 | SEQ ID NO: | SEQ ID NO: |
| family zinc finger 3 | | 405 | 406 |
| (Aiolos) | | | |
| // SLFN5 // schlafen | NM_144975 | SEQ ID NO: | SEQ ID NO: |
| family member 5 | | 407 | 408 |
| // CAMK4 // | NM_001744 | SEQ ID NO: | SEQ ID NO: |
| calcium/calmodulin- | | 409 | 410 |
| dependent protein | | | |
| kinase IV | | | |
| // PLA2G7 // | NM_005084 | SEQ ID NO: | SEQ ID NO: |
| phospholipase A2, | | 411 | 412 |
| group VII (platelet- | | | |
| activating factor | | | |
| acetylhydrolase, | | | |
| plasma) | | | |
| // TNS1 // tensin 1 | NM_022648 | SEQ ID NO: | SEQ ID NO: |
| | | 413 | 414 |
| // HBD // hemoglobin, | NM_000519 | SEQ ID NO: | SEQ ID NO: |
| delta | | 415 | 416 |
| // CTSL1 // cathepsin | NM_001912 | SEQ ID NO: | SEQ ID NO: |
| L1 | | 417 | 418 |
| // SELL // selectin L | NM_000655 | SEQ ID NO: | SEQ ID NO: |
| | | 419 | 420 |
| // TNFSF10 // tumor | NM_003810 | SEQ ID NO: | SEQ ID NO: |
| necrosis factor (ligand) | | 421 | 422 |
| superfamily, member | | | |
| 10 | | | |
| // CLIC2 // chloride | NM_001289 | SEQ ID NO: | SEQ ID NO: |
| intracellular channel 2 | | 423 | 424 |
| // RGL1 // ral guanine | NM_015149 | SEQ ID NO: | SEQ ID NO: |
| nucleotide dissociation | | 425 | 426 |
| stimulator-like 1 | | | |
| // TM4SF19 // | NM_138461 | SEQ ID NO: | SEQ ID NO: |
| transmembrane 4 L | | 427 | 428 |
| six family member 19 | | | |
| // TFCP2L1 // | NM_014553 | SEQ ID NO: | SEQ ID NO: |
| transcription factor | | 429 | 430 |
| CP2-like 1 | | | |
| // STEAP4 // STEAP | NM_024636 | SEQ ID NO: | SEQ ID NO: |
| family member 4 | | 431 | 432 |
| // GPR15 // G protein- | NM_005290 | SEQ ID NO: | SEQ ID NO: |
| coupled receptor 15 | | 433 | 434 |
| // CYBRD1 // | NM_024843 | SEQ ID NO: | SEQ ID NO: |
| cytochrome b | | 435 | 436 |
| reductase 1 | | | |
| // SFRP4 // secreted | NM_003014 | SEQ ID NO: | SEQ ID NO: |
| frizzled-related protein 4 | | 437 | 438 |
| // CMKLR1 // | NM_001142343 | SEQ ID NO: | SEQ ID NO: |
| chemokine-like | | 439 | 440 |
| receptor 1 | | | |
| // HGF // hepatocyte | NM_000601 | SEQ ID NO: | SEQ ID NO: |
| growth factor | | 441 | 442 |
| (hepapoietin A; scatter | | | |
| factor) | | | |
| // CCL2 // chemokine | NM_002982 | SEQ ID NO: | SEQ ID NO: |
| (C-C motif) ligand 2 | | 443 | 444 |
| // THSD7A // | NM_015204 | SEQ ID NO: | SEQ ID NO: |
| thrombospondin, type | | 445 | 446 |
| I, domain containing | | | |
| 7A | | | |
| // SULT1C2 // | NM_001056 | SEQ ID NO: | SEQ ID NO: |
| sulfotransferase | | 447 | 448 |
| family, cytosolic, 1C, | | | |
| member 2 | | | |
| // MMP9 // matrix | NM_004994 | SEQ ID NO: | SEQ ID NO: |
| metallopeptidase 9 | | 449 | 450 |
| (gelatinase B, 92 kDa | | | |
| gelatinase, 92 kDa | | | |
| type IV collagenase) | | | |
| // LRRC39 // leucine | NM_144620 | SEQ ID NO: | SEQ ID NO: |
| rich repeat containing | | 451 | 452 |
| 39 | | | |
| // HBB // hemoglobin, | NM_000518 | SEQ ID NO: | SEQ ID NO: |
| beta | | 453 | 454 |
| // CTSK // cathepsin K | NM_000396 | SEQ ID NO: | SEQ ID NO: |
| | | 455 | 456 |
| // FABP3 // fatty acid | NM_004102 | SEQ ID NO: | SEQ ID NO: |
| binding protein 3, | | 457 | 458 |
| muscle and heart | | | |
| (mammary-derived | | | |
| growth inhibitor) | | | |
| // ENPP2 // | NM_006209 | SEQ ID NO: | SEQ ID NO: |
| ectonucleotide | | 459 | 460 |
| pyrophosphatase/phosphodiesterase 2 | | | |
| // MLANA // melan-A | NM_005511 | SEQ ID NO: | SEQ ID NO: |
| | | 461 | 462 |
| ABCD2// ATP-binding | NM_005164 | SEQ ID NO: | SEQ ID NO: |
| cassette, sub-family D | | 999 | 1000 |
| (ALD), member 2 | | | |
| C12orf35//chromosome | NM_018169 | SEQ ID NO: | SEQ ID NO: |
| 12 open reading | | 1001 | 1002 |
| frame 35 | | | |
| CD207//CD207 | NM_015717 | SEQ ID NO: | SEQ ID NO: |
| molecule, langerin | | 1003 | 1004 |
| CD247//CD247 | NM_198053 | SEQ ID NO: | SEQ ID NO: |
| molecule | | 1005 | 1006 |
| CD27//CD27 | NM_001242 | SEQ ID NO: | SEQ ID NO: |
| molecule | | 1007 | 1008 |
| CD5L //CD5 | NM_005894 | SEQ ID NO: | SEQ ID NO: |
| molecule-like | | 1009 | 1010 |
| CHIT1//chitinase 1 | NM_003465 | SEQ ID NO: | SEQ ID NO: |
| (chitotriosidase) | | 1011 | 1012 |
| CLEC2D //C-type | NM_001004419 | SEQ ID NO: | SEQ ID NO: |
| lectin domain family 2, | | 1013 | 1014 |
| member D | | | |
| CST7//cystatin F | NM_003650 | SEQ ID NO: | SEQ ID NO: |
| (leukocystatin) | | 1015 | 1016 |
| DTNA //dystrobrevin, | NM_001390 | SEQ ID NO: | SEQ ID NO: |
| alpha | | 1017 | 1018 |
| ENTPD1//ectonucleoside | NM_001776 | SEQ ID NO: | SEQ ID NO: |
| triphosphate | | 1019 | 1020 |
| diphosphohydrolase 1 | | | |
| EPHB1 //EPH | NM_004441 | SEQ ID NO: | SEQ ID NO: |
| receptor B1 | | 1021 | 1022 |
| ESPNP //espin | NR_026567 | SEQ ID NO: | N/A |
| pseudogene | | 1023 | |
| FAM40B //family with | NM_020704 | SEQ ID NO: | SEQ ID NO: |
| sequence similarity | | 1024 | 1025 |
| 40, member B | | | |
| FAM87A //family with | BC037297 | SEQ ID NO: | N/A |
| sequence similarity | | 1026 | |
| 87, member A | | | |
| FBXO40//F-box | NM_016298 | SEQ ID NO: | SEQ ID NO: |
| protein 40 | | 1027 | 1028 |
| FCGR2A// Fc | NM_001136219 | SEQ ID NO: | SEQ ID NO: |
| fragment of IgG, low | | 1029 | 1030 |
| affinity IIa, receptor | | | |
| (CD32) | | | |
| FCGR2B //Fc | NM_004001 | SEQ ID NO: | SEQ ID NO: |
| fragment of IgG, low | | 1031 | 1032 |
| affinity IIb, receptor | | | |
| (CD32) | | | |
| FCGR2C //Fc | NM_201563 | SEQ ID NO: | SEQ ID NO: |
| fragment of IgG, low | | 1033 | 1034 |
| affinity IIc, receptor for | | | |
| (CD32) | | | |
| FMN1// formin 1 | ENST00000414268 | SEQ ID NO: | SEQ ID NO: |
| | | 1035 | 1036 |
| FMO1 //flavin | NM_002021 | SEQ ID NO: | SEQ ID NO: |
| containing | | 1037 | 1038 |
| monooxygenase 1 | | | |
| FOLH1 //folate | NM_153696 | SEQ ID NO: | SEQ ID NO: |
| hydrolase (prostate- | | 1039 | 1040 |
| specific membrane | | | |
| antigen) 1 | | | |
| FOLH1B //folate | NM_153696 | SEQ ID NO: | SEQ ID NO: |
| hydrolase 1B | | 1041 | 1042 |
| FYN //FYN oncogene | NM_002037 | SEQ ID NO: | SEQ ID NO: |
| related to SRC, FGR, | | 1043 | 1044 |
| YES | | | |
| GAST //gastrin | NM_000805 | SEQ ID NO: | SEQ ID NO: |
| | | 1045 | 1046 |
| GIMAP1//GTPase, | NM_130759 | SEQ ID NO: | SEQ ID NO: |
| IMAP family member 1 | | 1047 | 1048 |
| GIMAP5 //GTPase, | NM_018384 | SEQ ID NO: | SEQ ID NO: |
| IMAP family member 5 | | 1049 | 1050 |
| GIMAP8//GTPase, | NM_175571 | SEQ ID NO: | SEQ ID NO: |
| IMAP family member 8 | | 1051 | 1052 |
| GPX3//glutathione | NM_002084 | SEQ ID NO: | SEQ ID NO: |
| peroxidase 3 (plasma) | | 1053 | 1054 |
| GUSBL1//glucuronidase, | NR_003504 | SEQ ID NO: | N/A |
| beta-like 1 | | 1055 | |
| HAVCR2//hepatitis A | NM_032782 | SEQ ID NO: | SEQ ID NO: |
| virus cellular receptor 2 | | 1056 | 1057 |
| IGJ //immunoglobulin | NM_144646 | SEQ ID NO: | SEQ ID NO: |
| J polypeptide, linker | | 1058 | 1059 |
| protein for | | | |
| immunoglobulin alpha | | | |
| and mu polypeptides | | | |
| IGKV3D-11 // | ENST00000390250 | SEQ ID NO: | SEQ ID NO: |
| immunoglobulin kappa | | 1060 | 1061 |
| variable 3D-11 | | | |
| IL1R2// interleukin 1 | NM_004633 | SEQ ID NO: | SEQ ID NO: |
| receptor, type II | | 1062 | 1063 |
| JAKMIP2// janus | NM_014790 | SEQ ID NO: | SEQ ID NO: |
| kinase and | | 1064 | 1065 |
| microtubule interacting | | | |
| protein 2 | | | |
| KLHL38//kelch-like 38 | NM_001081675 | SEQ ID NO: | SEQ ID NO: |
| (Drosophila) | | 1066 | 1067 |
| LAT2 //linker for | NM_032464 | SEQ ID NO: | SEQ ID NO: |
| activation of T cells | | 1068 | 1069 |
| family, member 2 | | | |
| LIPA// lipase A, | NM_001127605 | SEQ ID NO: | SEQ ID NO: |
| lysosomal acid, | | 1070 | 1071 |
| cholesterol esterase | | | |
| LOC100128751//INM04 | AY194294 | SEQ ID NO: | SEQ ID NO: |
| | | 1072 | 1073 |
| LOC91316//glucuronidase, | NR_024448 | SEQ ID NO: | N/A |
| beta | | 1074 | |
| LPL //lipoprotein | NM_000237 | SEQ ID NO: | SEQ ID NO: |
| lipase | | 1075 | 1076 |
| LY9// lymphocyte | NM_002348 | SEQ ID NO: | SEQ ID NO: |
| antigen 9 | | 1077 | 1078 |
| MAF// v-maf | NM_001031804 | SEQ ID NO: | SEQ ID NO: |
| musculoaponeurotic | | 1079 | 1080 |
| fibrosarcoma | | | |
| oncogene homolog | | | |
| (avian) | | | |
| MATK | NM_139355 | SEQ ID NO: | SEQ ID NO: |
| //megakaryocyte- | | 1081 | 1082 |
| associated tyrosine | | | |
| kinase | | | |
| MS4A4A | NM_024021 | SEQ ID NO: | SEQ ID NO: |
| //membrane-spanning | | 1083 | 1084 |
| 4-domains, subfamily | | | |
| A, member 4 | | | |
| MX2 //myxovirus | NM_002463 | SEQ ID NO: | SEQ ID NO: |
| (influenza virus) | | 1085 | 1086 |
| resistance 2 (mouse) | | | |
| NCALD //neurocalcin | NM_001040624 | SEQ ID NO: | SEQ ID NO: |
| delta | | 1087 | 1088 |
| OBFC2A | NM_001031716 | SEQ ID NO: | SEQ ID NO: |
| //oligonucleotide | | 1089 | 1090 |
| OR14C36// olfactory | NM_001001918 | SEQ ID NO: | SEQ ID NO: |
| receptor, family 14, | | 1091 | 1092 |
| subfamily C, member | | | |
| 36 | | | |
| OR5L1//olfactory | NM_001004738 | SEQ ID NO: | SEQ ID NO: |
| receptor, family 5, | | 1093 | 1094 |
| subfamily L, member 1 | | | |
| PDZRN3//PDZ | NM_015009 | SEQ ID NO: | SEQ ID NO: |
| domain containing ring | | 1095 | 1096 |
| finger 3 | | | |
| PLXDC1//plexin | NM_020405 | SEQ ID NO: | SEQ ID NO: |
| domain containing 1 | | 1097 | 1098 |
| PP13004//hypothetical | ENST00000381493 | SEQ ID NO: | SEQ ID NO: |
| LOC402481 | | 1099 | 1100 |
| PSAT1 | NM_058179 | SEQ ID NO: | SEQ ID NO: |
| //phosphoserine | | 1101 | 1102 |
| aminotransferase 1 | | | |
| PTPRE //protein | NM_006504 | SEQ ID NO: | SEQ ID NO: |
| tyrosine phosphatase, | | 1103 | 1104 |
| receptor type, E | | | |
| RASSF2 //Ras | NM_014737 | SEQ ID NO: | SEQ ID NO: |
| association (RaIGDS | | 1105 | 1106 |
| RCAN3// RCAN family | NM_013441 | SEQ ID NO: | SEQ ID NO: |
| member 3 | | 1107 | 1108 |
| RCSD1 //RCSD | NM_052862 | SEQ ID NO: | SEQ ID NO: |
| domain containing 1 | | 1109 | 1110 |
| RGS10// regulator of | NM_001005339 | SEQ ID NO: | SEQ ID NO: |
| G-protein signaling 10 | | 1111 | 1112 |
| RGS9// regulator of G- | NM_003835 | SEQ ID NO: | SEQ ID NO: |
| protein signaling 9 | | 1113 | 1114 |
| RHOBTB1 //Rho- | NM_001242359, | SEQ ID NO: | SEQ ID NO: |
| related BTB domain | | 1115 | 1116 |
| containing 1 | | | |
| RNASE3// | NM_002935 | SEQ ID NO: | SEQ ID NO: |
| ribonuclease, RNase | | 1117 | 1118 |
| A family, 3 (eosinophil | | | |
| cationic protein) | | | |
| RTKN2 //rhotekin 2 | NM_145307 | SEQ ID NO: | SEQ ID NO: |
| | | 1119 | 1120 |
| RUNX2 //runt-related | NM_001024630 | SEQ ID NO: | SEQ ID NO: |
| transcription factor 2 | | 1121 | 1122 |
| SCML4 //sex comb on | NM_198081 | SEQ ID NO: | SEQ ID NO: |
| midleg-like 4 | | 1123 | 1124 |
| (Drosophila) | | | |
| SEPT3// septin 3 | NM_019106 | SEQ ID NO: | SEQ ID NO: |
| | | 1125 | 1126 |
| SH2D1A //SH2 | NM_002351 | SEQ ID NO: | SEQ ID NO: |
| domain protein 1A | | 1127 | 1128 |
| SLC16A9// solute | NM_194298 | SEQ ID NO: | SEQ ID NO: |
| carrier family 16, | | 1129 | 1130 |
| member 9 | | | |
| (monocarboxylic acid | | | |
| transporter 9) | | | |
| SLCO4A1// solute | NM_016354 | SEQ ID NO: | SEQ ID NO: |
| carrier organic anion | | 1131 | 1132 |
| transporter family, | | | |
| member 4A1 | | | |
| SMA5 | AK289851 | SEQ ID NO: | SEQ ID NO: |
| //glucuronidase, beta | | 1133 | 1134 |
| pseudogene | | | |
| ST3GAL5 //ST3 beta- | NM_003896 | SEQ ID NO: | SEQ ID NO: |
| galactoside alpha-2,3- | | 1135 | 1136 |
| sialyltransferase 5 | | | |
| SULF2 //sulfatase 2 | NM_018837 | SEQ ID NO: | SEQ ID NO: |
| | | 1137 | 1138 |
| TCF7 //transcription | NM_201634 | SEQ ID NO: | SEQ ID NO: |
| factor 7 (T-cell | | 1139 | 1140 |
| specific, HMG-box) | | | |
| TMEM176A// | NM_018487 | SEQ ID NO: | SEQ ID NO: |
| transmembrane | | 1141 | 1142 |
| protein 176A | | | |
| TMEM45A// | NM_018004 | SEQ ID NO: | SEQ ID NO: |
| transmembrane | | 1143 | 1144 |
| protein 45A | | | |
| TRAF3IP3// TRAF3 | NM_025228 | SEQ ID NO: | SEQ ID NO: |
| interacting protein 3 | | 1145 | 1146 |
| TREM2// triggering | NM_018965 | SEQ ID NO: | SEQ ID NO: |
| receptor expressed on | | 1147 | 1148 |
| myeloid cells 2 | | | |
| TYR //tyrosinase | NM_000372 | SEQ ID NO: | SEQ ID NO: |
| (oculocutaneous | | 1149 | 1150 |
| albinism IA) | | | |
| UBASH3A //ubiquitin | NM_018961 | SEQ ID NO: | SEQ ID NO: |
| associated and SH3 | | 1151 | 1152 |
| domain containing, A | | | |

TABLE 2
Genes Down-regulated Upon STX-100 Administration

| | | Nucleotide | Protein |
|---|---|---|---|
| gene_assignment | Genbank No. | Sequence | Sequence |
| // GPR82 // G protein- | NM_080817 | SEQ ID NO: | SEQ ID NO: |
| coupled receptor 82 | | 463 | 464 |
| // ENPP1 // | NM_006208 | SEQ ID NO: | SEQ ID NO: |
| ectonucleotide | | 465 | 466 |
| pyrophosphatase/phosphodiesterase 1 | | | |
| // THBS1 // | NM_003246 | SEQ ID NO: | SEQ ID NO: |
| thrombospondin 1 | | 467 | 468 |
| // SYDE2 // synapse | NM_032184 | SEQ ID NO: | SEQ ID NO: |
| defective 1, Rho | | 469 | 470 |
| GTPase, homolog 2 | | | |
| (C. elegans) | | | |
| // IGSF2 // | NM_004258 | SEQ ID NO: | SEQ ID NO: |
| immunoglobulin | | 471 | 472 |
| superfamily, member 2 | | | |
| // RETN // resistin | NM_020415 | SEQ ID NO: | SEQ ID NO: |
| | | 473 | 474 |
| // GPR116 // G protein- | NM_015234 | SEQ ID NO: | SEQ ID NO: |
| coupled receptor 116 | | 475 | 476 |
| // TRHDE // | NM_013381 | SEQ ID NO: | SEQ ID NO: |
| thyrotropin-releasing | | 477 | 478 |
| hormone degrading | | | |
| enzyme | | | |
| // CACNB4 // calcium | NM_000726 | SEQ ID NO: | SEQ ID NO: |
| channel, voltage- | | 479 | 480 |
| dependent, beta 4 | | | |
| subunit | | | |
| // PLXDC2 // plexin | NM_032812 | SEQ ID NO: | SEQ ID NO: |
| domain containing 2 | | 481 | 482 |
| // SMC6 // structural | NM_001142286 | SEQ ID NO: | SEQ ID NO: |
| maintenance of | | 483 | 484 |
| chromosomes 6 | | | |
| // OLR1 // oxidized low | NM_002543 | SEQ ID NO: | SEQ ID NO: |
| density lipoprotein | | 485 | 486 |
| (lectin-like) receptor 1 | | | |
| // SERPINE1 // serpin | NM_000602 | SEQ ID NO: | SEQ ID NO: |
| peptidase inhibitor, | | 487 | 488 |
| clade E (nexin, | | | |
| plasminogen activator | | | |
| inhibitor type 1), | | | |
| member 1 | | | |
| // MEST // mesoderm | NM_002402 | SEQ ID NO: | SEQ ID NO: |
| specific transcript | | 489 | 490 |
| homolog (mouse) | | | |
| // LY75 // lymphocyte | NM_002349 | SEQ ID NO: | SEQ ID NO: |
| antigen 75 | | 491 | 492 |
| // PRKAR2B // protein | NM_002736 | SEQ ID NO: | SEQ ID NO: |
| kinase, cAMP- | | 493 | 494 |
| dependent, regulatory, | | | |
| type II, beta | | | |
| // TCF7L2 // | NM_001146274 | SEQ ID NO: | SEQ ID NO: |
| transcription factor 7- | | 495 | 496 |
| like 2 (T-cell specific, | | | |
| HMG-box) | | | |
| // CLEC5A // C-type | NM_013252 | SEQ ID NO: | SEQ ID NO: |
| lectin domain family 5, | | 497 | 498 |
| member A | | | |
| // AWAT2 // acyl-CoA | NM_001002254 | SEQ ID NO: | SEQ ID NO: |
| wax alcohol | | 499 | 500 |
| acyltransferase 2 | | | |
| // B3GNT5 // UDP- | NM_032047 | SEQ ID NO: | SEQ ID NO: |
| GlcNAc:betaGal beta- | | 501 | 502 |
| 1,3-N- | | | |
| acetylglucosaminyltransferase 5 | | | |
| // MICAL3 // | NM_015241 | SEQ ID NO: | SEQ ID NO: |
| microtubule associated | | 503 | 504 |
| monoxygenase, | | | |
| calponin and LIM | | | |
| domain containing 3 | | | |
| // PLAC8 // placenta- | NM_016619 | SEQ ID NO: | SEQ ID NO: |
| specific 8 | | 505 | 506 |
| // SLC11A1 // solute | NM_000578 | SEQ ID NO: | SEQ ID NO: |
| carrier family 11 | | 507 | 508 |
| (proton-coupled | | | |
| divalent metal ion | | | |
| transporters), member 1 | | | |
| // HSF5 // heat shock | NM_001080439 | SEQ ID NO: | SEQ ID NO: |
| transcription factor | | 509 | 510 |
| family member 5 // | | | |
| 17q22 // 124535 /// | | | |
| ENST00000323777 // | | | |
| HSF5 // heat shock | | | |
| transcription factor | | | |
| family member 5 | | | |
| // EDIL3 // EGF-like | NM_005711 | SEQ ID NO: | SEQ ID NO: |
| repeats and discoidin | | 511 | 512 |
| I-like domains 3 | | | |
| // GLRB // glycine | NM_000824 | SEQ ID NO: | SEQ ID NO: |
| receptor, beta | | 513 | 514 |
| // GPR120 // G protein- | NM_181745 | SEQ ID NO: | SEQ ID NO: |
| coupled receptor 120 | | 515 | 516 |
| // EMR1 // egf-like | NM_001974 | SEQ ID NO: | SEQ ID NO: |
| module containing, | | 517 | 518 |
| mucin-like, hormone | | | |
| receptor-like 1 | | | |
| // CHI3L1 // chitinase | NM_001276 | SEQ ID NO: | SEQ ID NO: |
| 3-like 1 (cartilage | | 519 | 520 |
| glycoprotein-39) | | | |
| // RTN1 // reticulon 1 | NM_021136 | SEQ ID NO: | SEQ ID NO: |
| | | 521 | 522 |
| // GCA // grancalcin, | NM_012198 | SEQ ID NO: | SEQ ID NO: |
| EF-hand calcium | | 523 | 524 |
| binding protein | | | |
| // CLIP4 // CAP-GLY | NM_024692 | SEQ ID NO: | SEQ ID NO: |
| domain containing | | 525 | 526 |
| linker protein family, | | | |
| member 4 | | | |
| // SGMS1 // | NM_147156 | SEQ ID NO: | SEQ ID NO: |
| sphingomyelin | | 527 | 528 |
| synthase 1 | | | |
| // FN1 // fibronectin 1 | NM_212482 | SEQ ID NO: | SEQ ID NO: |
| | | 529 | 530 |
| // FAM9C // family with | NM_174901 | SEQ ID NO: | SEQ ID NO: |
| sequence similarity 9, | | 531 | 532 |
| member C | | | |
| // FER1L6 // fer-1-like | NM_001039112 | SEQ ID NO: | SEQ ID NO: |
| 6 (C. elegans) | | 533 | 534 |
| // PGM5P2 // | NR_002836 | SEQ ID NO: | N/A |
| phosphoglucomutase | | 535 | |
| 5 pseudogene 2 | | | |
| // MMD // monocyte to | NM_012329 | SEQ ID NO: | SEQ ID NO: |
| macrophage | | 536 | 537 |
| differentiation- | | | |
| associated | | | |
| // SEMA3D // sema | NM_152754 | SEQ ID NO: | SEQ ID NO: |
| domain, | | 538 | 539 |
| immunoglobulin | | | |
| domain (Ig), short | | | |
| basic domain, | | | |
| secreted, (semaphorin) | | | |
| 3D | | | |
| // GEN1 // Gen | NM_182625 | SEQ ID NO: | SEQ ID NO: |
| homolog 1, | | 540 | 541 |
| endonuclease | | | |
| (Drosophila) | | | |
| // PGM5P2 // | NR_002836 | SEQ ID NO: | N/A |
| phosphoglucomutase | | 542 | |
| 5 pseudogene 2 | | | |
| // ALOX5 // | NM_000698 | SEQ ID NO: | SEQ ID NO: |
| arachidonate 5- | | 543 | 544 |
| lipoxygenase | | | |
| // CARD17 // caspase | NM_001007232 | SEQ ID NO: | SEQ ID NO: |
| recruitment domain | | 545 | 546 |
| family, member 17 | | | |
| // ITGA6 // integrin, | NM_000210 | SEQ ID NO: | SEQ ID NO: |
| alpha 6 | | 547 | 548 |
| // CAMP // cathelicidin | NM_004345 | SEQ ID NO: | SEQ ID NO: |
| antimicrobial peptide | | 549 | 550 |
| // MTHFD1L // | NM_015440 | SEQ ID NO: | SEQ ID NO: |
| methylenetetrahydrofolate | | 551 | 552 |
| dehydrogenase | | | |
| (NADP+ dependent) 1- | | | |
| like | | | |
| // MINK1 // misshapen- | NM_153827 | SEQ ID NO: | SEQ ID NO: |
| like kinase 1 | | 553 | 554 |
| (zebrafish) | | | |
| // FHL1 // four and a | NM_001159702 | SEQ ID NO: | SEQ ID NO: |
| half LIM domains 1 | | 555 | 556 |
| — | | | |
| // GPAM // glycerol-3- | NM_020918 | SEQ ID NO: | SEQ ID NO: |
| phosphate | | 557 | 558 |
| acyltransferase, | | | |
| mitochondrial | | | |
| // AMIGO2 // adhesion | NM_001143668 | SEQ ID NO: | SEQ ID NO: |
| molecule with Ig-like | | 559 | 560 |
| domain 2 | | | |
| // TREM1 // triggering | NM_018643 | SEQ ID NO: | SEQ ID NO: |
| receptor expressed on | | 561 | 562 |
| myeloid cells 1 | | | |
| // STAP1 // signal | NM_012108 | SEQ ID NO: | SEQ ID NO: |
| transducing adaptor | | 563 | 564 |
| family member 1 | | | |
| // ABCG1 // ATP- | NM_207627 | SEQ ID NO: | SEQ ID NO: |
| binding cassette, sub- | | 565 | 566 |
| family G (WHITE), | | | |
| member 1 | | | |
| // PRSS12 // protease, | NM_003619 | SEQ ID NO: | SEQ ID NO: |
| serine, 12 | | 567 | 568 |
| (neurotrypsin, | | | |
| motopsin) | | | |
| // NIACR2 // niacin | NM_006018 | SEQ ID NO: | SEQ ID NO: |
| receptor 2 | | 569 | 570 |
| // PPARG // | NM_138712 | SEQ ID NO: | SEQ ID NO: |
| peroxisome | | 571 | 572 |
| proliferator-activated | | | |
| receptor gamma | | | |
| // ENO3 // enolase 3 | NM_001976 | SEQ ID NO: | SEQ ID NO: |
| (beta, muscle) | | 573 | 574 |
| // DLEU2L // deleted in | NR_002771 | SEQ ID NO: | N/A |
| lymphocytic leukemia | | 575 | |
| 2-like | | | |
| // NOSTRIN // nitric | NM_001039724 | SEQ ID NO: | SEQ ID NO: |
| oxide synthase | | 576 | 577 |
| trafficker | | | |
| // KCNA3 // potassium | NM_002232 | SEQ ID NO: | SEQ ID NO: |
| voltage-gated channel, | | 578 | 579 |
| shaker-related | | | |
| subfamily, member 3 | | | |
| // CGNL1 // cingulin- | NM_032866 | SEQ ID NO: | SEQ ID NO: |
| like 1 | | 580 | 581 |
| // MATN2 // matrilin 2 | NM_002380 | SEQ ID NO: | SEQ ID NO: |
| | | 582 | 583 |
| // CLEC4D // C-type | NM_080387 | SEQ ID NO: | SEQ ID NO: |
| lectin domain family 4, | | 584 | 585 |
| member D | | | |
| // CENPV // | NM_181716 | SEQ ID NO: | SEQ ID NO: |
| centromere protein V | | 586 | 587 |
| // RAB13 // RAB13, | NM_002870 | SEQ ID NO: | SEQ ID NO: |
| member RAS | | 588 | 589 |
| oncogene family | | | |
| // OLFML3 // | NM_020190 | SEQ ID NO: | SEQ ID NO: |
| olfactomedin-like 3 | | 590 | 591 |
| // KCNMB1 // | NM_004137 | SEQ ID NO: | SEQ ID NO: |
| potassium large | | 592 | 593 |
| conductance calcium- | | | |
| activated channel, | | | |
| subfamily M, beta | | | |
| member 1 | | | |
| // FPR1 // formyl | NM_002029 | SEQ ID NO: | SEQ ID NO: |
| peptide receptor 1 | | 594 | 595 |
| // DST // dystonin | NM_001144769 | SEQ ID NO: | SEQ ID NO: |
| | | 596 | 597 |
| — | | | |
| // CD1D // CD1d | NM_001766 | SEQ ID NO: | SEQ ID NO: |
| molecule | | 598 | 599 |
| // PECAM1 // | NM_000442 | SEQ ID NO: | SEQ ID NO: |
| platelet/endothelial cell | | 600 | 601 |
| adhesion molecule | | | |
| // DDHD1 // DDHD | NM_001160148 | SEQ ID NO: | SEQ ID NO: |
| domain containing 1 | | 602 | 603 |
| // KLHDC8B // kelch | NM_173546 | SEQ ID NO: | SEQ ID NO: |
| domain containing 8B | | 604 | 605 |
| // ATP8B4 // ATPase, | NM_024837 | SEQ ID NO: | SEQ ID NO: |
| class I, type 8B, | | 606 | 607 |
| member 4 | | | |
| // GPD1 // glycerol-3- | NM_005276 | SEQ ID NO: | SEQ ID NO: |
| phosphate | | 608 | 609 |
| dehydrogenase 1 | | | |
| (soluble) | | | |
| // MCF2L2 // MCF.2 | NM_015078 | SEQ ID NO: | SEQ ID NO: |
| cell line derived | | 610 | 611 |
| transforming | | | |
| sequence-like 2 | | | |
| // SVIL // supervillin | NM_021738 | SEQ ID NO: | SEQ ID NO: |
| | | 612 | 613 |
| // ICAM3 // intercellular | NM_002162 | SEQ ID NO: | SEQ ID NO: |
| adhesion molecule 3 | | 614 | 615 |
| // NLRC4 // NLR | NM_021209 | SEQ ID NO: | SEQ ID NO: |
| family, CARD domain | | 616 | 617 |
| containing 4 | | | |
| // SLC25A16 // solute | NM_152707 | SEQ ID NO: | SEQ ID NO: |
| carrier family 25 | | 618 | 619 |
| (mitochondrial carrier; | | | |
| Graves disease | | | |
| autoantigen), member | | | |
| 16 | | | |
| // CD163 // CD163 | NM_004244 | SEQ ID NO: | SEQ ID NO: |
| molecule | | 620 | 621 |
| // GPR162 // G protein- | NM_019858 | SEQ ID NO: | SEQ ID NO: |
| coupled receptor 162 | | 622 | 623 |
| // RAB30 // RAB30, | NM_014488 | SEQ ID NO: | SEQ ID NO: |
| member RAS | | 624 | 625 |
| oncogene family | | | |
| // SMAD7 // SMAD | NM_005904 | SEQ ID NO: | SEQ ID NO: |
| family member 7 | | 626 | 627 |
| // HBEGF // heparin- | NM_001945 | SEQ ID NO: | SEQ ID NO: |
| binding EGF-like | | 628 | 629 |
| growth factor | | | |
| // RHBDD2 // rhomboid | NM_001040457 | SEQ ID NO: | SEQ ID NO: |
| domain containing 2 | | 630 | 631 |
| // GPR116 // G protein- | NM_015234 | SEQ ID NO: | SEQ ID NO: |
| coupled receptor 116 | | 632 | 633 |
| // ITPR1 // inositol | NM_001099952 | SEQ ID NO: | SEQ ID NO: |
| 1,4,5-triphosphate | | 634 | 635 |
| receptor, type 1 | | | |
| // PIWIL1 // piwi-like 1 | NM_004764 | SEQ ID NO: | SEQ ID NO: |
| (Drosophila) | | 636 | 637 |
| // TANC2 // | NM_025185 | SEQ ID NO: | SEQ ID NO: |
| tetratricopeptide | | 638 | 639 |
| repeat, ankyrin repeat | | | |
| and coiled-coil | | | |
| containing 2 | | | |
| // PHGDH // | NM_006623 | SEQ ID NO: | SEQ ID NO: |
| phosphoglycerate | | 640 | 641 |
| dehydrogenase | | | |
| // MTHFS // 5,10- | NM_006441 | SEQ ID NO: | SEQ ID NO: |
| methenyltetrahydrofolate | | 642 | 643 |
| synthetase (5- | | | |
| formyltetrahydrofolate | | | |
| cyclo-ligase) | | | |
| // PGM5 // | NM_021965 | SEQ ID NO: | SEQ ID NO: |
| phosphoglucomutase 5 | | 644 | 645 |
| — | | | |
| // CHI3L2 // chitinase | NM_001025199 | SEQ ID NO: | SEQ ID NO: |
| 3-like 2 | | 646 | 647 |
| // C19orf59 // | NM_174918 | SEQ ID NO: | SEQ ID NO: |
| chromosome 19 open | | 648 | 649 |
| reading frame 59 | | | |
| // CDH1 // cadherin 1, | NM_004360 | SEQ ID NO: | SEQ ID NO: |
| type 1, E-cadherin | | 650 | 651 |
| (epithelial) | | | |
| — | | | |
| // LDLRAP1 // low | NM_015627 | SEQ ID NO: | SEQ ID NO: |
| density lipoprotein | | 652 | 653 |
| receptor adaptor | | | |
| protein 1 | | | |
| // PANX1 // pannexin 1 | NM_015368 | SEQ ID NO: | SEQ ID NO: |
| | | 654 | 655 |
| // DGAT2 // | NM_032564 | SEQ ID NO: | SEQ ID NO: |
| diacylglycerol O- | | 656 | 657 |
| acyltransferase | | | |
| homolog 2 (mouse) | | | |
| // ABHD5 // | NM_016006 | SEQ ID NO: | SEQ ID NO: |
| abhydrolase domain | | 658 | 659 |
| containing 5 | | | |
| // STX6 // syntaxin 6 | NM_005819 | SEQ ID NO: | SEQ ID NO: |
| | | 660 | 661 |
| // MCTP1 // multiple | NM_024717 | SEQ ID NO: | SEQ ID NO: |
| C2 domains, | | 662 | 663 |
| transmembrane 1 | | | |
| // CCRL1 // chemokine | NM_178445 | SEQ ID NO: | SEQ ID NO: |
| (C-C motif) receptor- | | 664 | 665 |
| like 1 | | | |
| // FRMD4A // FERM | NM_018027 | SEQ ID NO: | SEQ ID NO: |
| domain containing 4A | | 666 | 667 |
| // CD300LD // CD300 | NM_001115152 | SEQ ID NO: | SEQ ID NO: |
| molecule-like family | | 668 | 669 |
| member d | | | |
| // SIRPB2 // signal- | NM_001122962 | SEQ ID NO: | SEQ ID NO: |
| regulatory protein beta 2 | | 670 | 671 |
| // C9orf150 // | NM_203403 | SEQ ID NO: | SEQ ID NO: |
| chromosome 9 open | | 672 | 673 |
| reading frame 150 | | | |
| // TMEM65 // | NM_194291 | SEQ ID NO: | SEQ ID NO: |
| transmembrane | | 674 | 675 |
| protein 65 | | | |
| // CDC42EP3 // | NM_006449 | SEQ ID NO: | SEQ ID NO: |
| CDC42 effector protein | | 676 | 677 |
| (Rho GTPase binding) 3 | | | |
| // UBASH3B // | NM_032873 | SEQ ID NO: | SEQ ID NO: |
| ubiquitin associated | | 678 | 679 |
| and SH3 domain | | | |
| containing, B | | | |
| // TTC39B // | NM_152574 | SEQ ID NO: | SEQ ID NO: |
| tetratricopeptide repeat | | 680 | 681 |
| domain 39B | | | |
| // TGM2 // | NM_004613 | SEQ ID NO: | SEQ ID NO: |
| transglutaminase 2 (C | | 682 | 683 |
| polypeptide, protein- | | | |
| glutamine-gamma- | | | |
| glutamyltransferase) | | | |
| // KIAA1598 // | NM_001127211 | SEQ ID NO: | SEQ ID NO: |
| KIAA1598 | | 684 | 685 |
| // FCGR1B // Fc | NM_001017986 | SEQ ID NO: | SEQ ID NO: |
| fragment of IgG, high | | 686 | 687 |
| affinity Ib, receptor | | | |
| (CD64) | | | |
| // ALDH2 // aldehyde | NM_000690 | SEQ ID NO: | SEQ ID NO: |
| dehydrogenase 2 | | 688 | 689 |
| family (mitochondrial) | | | |
| // TECR // trans-2,3- | NM_138501 | SEQ ID NO: | SEQ ID NO: |
| enoyl-CoA reductase | | 690 | 691 |
| // LAPTM4B // | NM_018407 | SEQ ID NO: | SEQ ID NO: |
| lysosomal protein | | 692 | 693 |
| transmembrane 4 beta | | | |
| // DEPDC6 // DEP | NM_022783 | SEQ ID NO: | SEQ ID NO: |
| domain containing 6 | | 694 | 695 |
| // FCGR1A // Fc | NM_000566 | SEQ ID NO: | SEQ ID NO: |
| fragment of IgG, high | | 696 | 697 |
| affinity Ia, receptor | | | |
| (CD64) | | | |
| // CRYBG3 // beta- | NM_153605 | SEQ ID NO: | SEQ ID NO: |
| gamma crystallin | | 698 | 699 |
| domain containing 3 | | | |
| // LILRA5 // leukocyte | NM_021250 | SEQ ID NO: | SEQ ID NO: |
| immunoglobulin-like | | 700 | 701 |
| receptor, subfamily A | | | |
| (with TM domain), | | | |
| member 5 | | | |
| // FCGR1A // Fc | NM_000566 | SEQ ID NO: | SEQ ID NO: |
| fragment of IgG, high | | 702 | 703 |
| affinity Ia, receptor | | | |
| (CD64) | | | |
| // PDCL // phosducin- | NM_005388 | SEQ ID NO: | SEQ ID NO: |
| like | | 704 | 705 |
| // DGKH // | NM_178009 | SEQ ID NO: | SEQ ID NO: |
| diacylglycerol kinase, | | 706 | 707 |
| eta | | | |
| // FRK // fyn-related | NM_002031 | SEQ ID NO: | SEQ ID NO: |
| kinase | | 708 | 709 |
| ENST00000367321 // | ENST00000367321 | SEQ ID NO: | SEQ ID NO: |
| MTHFD1L // | | 710 | 711 |
| methylenetetrahydrofolate | | | |
| dehydrogenase | | | |
| (NADP+ dependent) 1- | | | |
| like | | | |
| // POPDC3 // popeye | NM_022361 | SEQ ID NO: | SEQ ID NO: |
| domain containing 3 | | 712 | 713 |
| // AIM2 // absent in | NM_004833 | SEQ ID NO: | SEQ ID NO: |
| melanoma 2 | | 714 | 715 |
| // CYSLTR2 // cysteinyl | NM_020377 | SEQ ID NO: | SEQ ID NO: |
| leukotriene receptor 2 | | 716 | 717 |
| // RP5-1022P6.2 // | NM_019593 | SEQ ID NO: | SEQ ID NO: |
| hypothetical protein | | 718 | 719 |
| KIAA1434 | | | |
| // GPR124 // G protein- | NM_032777 | SEQ ID NO: | SEQ ID NO: |
| coupled receptor 124 | | 720 | 721 |
| // SVIP // small | NM_148893 | SEQ ID NO: | SEQ ID NO: |
| VCP/p97-interacting | | 722 | 723 |
| protein | | | |
| // GPHN // gephyrin | NM_020806 | SEQ ID NO: | SEQ ID NO: |
| | | 724 | 725 |
| // HK3 // hexokinase 3 | NM_002115 | SEQ ID NO: | SEQ ID NO: |
| (white cell) | | 726 | 727 |
| // ALOX5AP // | NM_001629 | SEQ ID NO: | SEQ ID NO: |
| arachidonate 5- | | 728 | 729 |
| lipoxygenase- | | | |
| activating protein | | | |
| // NCF1 // neutrophil | NM_000265 | SEQ ID NO: | SEQ ID NO: |
| cytosolic factor 1 | | 730 | 731 |
| // NGFRAP1 // nerve | NM_206917 | SEQ ID NO: | SEQ ID NO: |
| growth factor receptor | | 732 | 733 |
| (TNFRSF16) | | | |
| associated protein 1 | | | |
| // LGR4 // leucine-rich | NM_018490 | SEQ ID NO: | SEQ ID NO: |
| repeat-containing G | | 734 | 735 |
| protein-coupled | | | |
| receptor 4 | | | |
| // CABLES1 // Cdk5 | NM_138375 | SEQ ID NO: | SEQ ID NO: |
| and Abl enzyme | | 736 | 737 |
| substrate 1 | | | |
| // NCF1 // neutrophil | NM_000265 | SEQ ID NO: | SEQ ID NO: |
| cytosolic factor 1 | | 738 | 739 |
| // FLOT2 // flotillin 2 | NM_004475 | SEQ ID NO: | SEQ ID NO: |
| | | 740 | 741 |
| // CDC42BPB // | NM_006035 | SEQ ID NO: | SEQ ID NO: |
| CDC42 binding protein | | 742 | 743 |
| kinase beta (DMPK- | | | |
| like) | | | |
| // LRP1 // low density | NM_002332 | SEQ ID NO: | SEQ ID NO: |
| lipoprotein-related | | 744 | 745 |
| protein 1 (alpha-2- | | | |
| macroglobulin | | | |
| receptor) | | | |
| // C17orf76 // | NM_001113567 | SEQ ID NO: | SEQ ID NO: |
| chromosome 17 open | | 746 | 747 |
| reading frame 76 | | | |
| // TMEM150B // | NM_001085488 | SEQ ID NO: | SEQ ID NO: |
| transmembrane | | 748 | 749 |
| protein 150B | | | |
| // ENTPD3 // | NM_001248 | SEQ ID NO: | SEQ ID NO: |
| ectonucleoside | | 750 | 751 |
| triphosphate | | | |
| diphosphohydrolase 3 | | | |
| // HLCS // | NM_000411 | SEQ ID NO: | SEQ ID NO: |
| holocarboxylase | | 752 | 753 |
| synthetase (biotin- | | | |
| (proprionyl-Coenzyme | | | |
| A-carboxylase (ATP- | | | |
| hydrolysing)) ligase) | | | |
| // DENND1B // | NM_001142795 | SEQ ID NO: | SEQ ID NO: |
| DENN/MADD domain | | 754 | 755 |
| containing 1B | | | |
| // MYO6 // myosin VI | NM_004999 | SEQ ID NO: | SEQ ID NO: |
| | | 756 | 757 |
| // TXNDC16 // | NM_020784 | SEQ ID NO: | SEQ ID NO: |
| thioredoxin domain | | 758 | 759 |
| containing 16 | | | |
| // FLVCR2 // feline | NM_017791 | SEQ ID NO: | SEQ ID NO: |
| leukemia virus | | 760 | 761 |
| subgroup C cellular | | | |
| receptor family, | | | |
| member 2 | | | |
| // ABCC4 // ATP- | NM_005845 | SEQ ID NO: | SEQ ID NO: |
| binding cassette, sub- | | 762 | 763 |
| family C (CFTR/MRP), | | | |
| member 4 | | | |
| // PFKFB3 // 6- | NM_004566 | SEQ ID NO: 764 | SEQ ID NO: |
| phosphofructo-2- | | | 765 |
| kinase/fructose-2,6- | | | |
| biphosphatase 3 | | | |
| // SLC36A4 // solute | NM_152313 | SEQ ID NO: | SEQ ID NO: |
| carrier family 36 | | 766 | 767 |
| (proton/amino acid | | | |
| symporter), member 4 | | | |
| // CLEC4E // C-type | NM_014358 | SEQ ID NO: 768 | SEQ ID NO: |
| lectin domain family 4, | | | 769 |
| member E | | | |
| // CD302 // CD302 | NM_014880 | SEQ ID NO: | SEQ ID NO: |
| molecule | | 770 | 771 |
| // SFRP2 // secreted | NM_003013 | SEQ ID NO: | SEQ ID NO: |
| frizzled-related protein 2 | | 772 | 773 |
| // NCF1 // neutrophil | NM_000265 | SEQ ID NO: | SEQ ID NO: |
| cytosolic factor 1 | | 774 | 775 |
| // MC3R // | NM_019888 | SEQ ID NO: | SEQ ID NO: |
| melanocortin 3 | | 776 | 777 |
| receptor | | | |
| // NP // nucleoside | NM_000270 | SEQ ID NO: | SEQ ID NO: |
| phosphorylase | | 778 | 779 |
| // SLC9A7 // solute | NM_032591 | SEQ ID NO: | SEQ ID NO: |
| carrier family 9 | | 780 | 781 |
| (sodium/hydrogen | | | |
| exchanger), member 7 | | | |
| // NID1 // nidogen 1 | NM_002508 | SEQ ID NO: | SEQ ID NO: |
| | | 782 | 783 |
| // GPRIN3 // GPRIN | NM_198281 | SEQ ID NO: | SEQ ID NO: |
| family member 3 | | 784 | 785 |
| // GLIPR2 // GLI | NM_022343 | SEQ ID NO: | SEQ ID NO: |
| pathogenesis-related 2 | | 786 | 787 |
| // PLEKHH2 // | NM_172069 | SEQ ID NO: | SEQ ID NO: |
| pleckstrin homology | | 788 | 789 |
| domain containing, | | | |
| family H (with MyTH4 | | | |
| domain) member 2 | | | |
| // MERTK // c-mer | NM_006343 | SEQ ID NO: | SEQ ID NO: |
| proto-oncogene | | 790 | 791 |
| tyrosine kinase | | | |
| ENST00000367321 // | ENST00000367321 | SEQ ID NO: | SEQ ID NO: |
| MTHFD1L // | | 792 | 793 |
| methylenetetrahydrofolate | | | |
| dehydrogenase | | | |
| (NADP+ dependent) 1- | | | |
| like | | | |
| // AK3L1 // adenylate | NM_001005353 | SEQ ID NO: | SEQ ID NO: |
| kinase 3-like 1 | | 794 | 795 |
| // RASA1 // RAS p21 | NM_002890 | SEQ ID NO: | SEQ ID NO: |
| protein activator | | 796 | 797 |
| (GTPase activating | | | |
| protein) 1 | | | |
| — | | | |
| // CXCL16 // | NM_022059 | SEQ ID NO: | SEQ ID NO: |
| chemokine (C—X—C | | 798 | 799 |
| motif) ligand 16 | | | |
| // AXL // AXL receptor | NM_021913 | SEQ ID NO: | SEQ ID NO: |
| tyrosine kinase | | 800 | 801 |
| // PDE3B // | NM_000922 | SEQ ID NO: | SEQ ID NO: |
| phosphodiesterase 3B, | | 802 | 803 |
| cGMP-inhibited | | | |
| ENST00000367321 // | ENST00000367321 | SEQ ID NO: | SEQ ID NO: |
| MTHFD1L // | | 792 | 793 |
| methylenetetrahydrofolate | | | |
| dehydrogenase | | | |
| (NADP+ dependent) 1- | | | |
| like | | | |
| // LONRF3 // LON | NM_001031855 | SEQ ID NO: | SEQ ID NO: |
| peptidase N-terminal | | 804 | 805 |
| domain and ring finger 3 | | | |
| // PION // pigeon | NM_017439 | SEQ ID NO: | SEQ ID NO: |
| homolog (Drosophila) | | 806 | 807 |
| // BHLHE41 // basic | NM_030762 | SEQ ID NO: | SEQ ID NO: |
| helix-loop-helix family, | | 808 | 809 |
| member e41 | | | |
| // TLN2 // talin 2 | NM_015059 | SEQ ID NO: | SEQ ID NO: |
| | | 810 | 811 |
| // SPNS1 // spinster | NM_032038 | SEQ ID NO: | SEQ ID NO: |
| homolog 1 | | 812 | 813 |
| (Drosophila) | | | |
| // MEFV // | NM_000243 | SEQ ID NO: | SEQ ID NO: |
| Mediterranean fever | | 814 | 815 |
| // FAM69A // family | NM_001006605 | SEQ ID NO: | SEQ ID NO: |
| with sequence | | 816 | 817 |
| similarity 69, member A | | | |
| // LRRFIP1 // leucine | NM_001137550 | SEQ ID NO: | SEQ ID NO: |
| rich repeat (in FLII) | | 818 | 819 |
| interacting protein 1 | | | |
| // ATP10A // ATPase, | NM_024490 | SEQ ID NO: | SEQ ID NO: |
| class V, type 10A | | 820 | 821 |
| — | | | |
| // EGLN3 // egl nine | NM_022073 | SEQ ID NO: | SEQ ID NO: |
| homolog 3 (C. elegans) | | 822 | 823 |
| // FGD2 // FYVE, | NM_173558 | SEQ ID NO: | SEQ ID NO: |
| RhoGEF and PH | | 824 | 825 |
| domain containing 2 | | | |
| // LSM6 // LSM6 | NM_007080 | SEQ ID NO: | SEQ ID NO: |
| homolog, U6 small | | 826 | 827 |
| nuclear RNA | | | |
| associated (S. cerevisiae) | | | |
| // MANBA // | NM_005908 | SEQ ID NO: | SEQ ID NO: |
| mannosidase, beta A, | | 828 | 829 |
| lysosomal | | | |
| // CD300LF // CD300 | NM_139018 | SEQ ID NO: | SEQ ID NO: |
| molecule-like family | | 830 | 831 |
| member f | | | |
| // C1orf38 // | NM_001105556 | SEQ ID NO: | SEQ ID NO: |
| chromosome 1 open | | 832 | 833 |
| reading frame 38 | | | |
| // IRS2 // insulin | NM_003749 | SEQ ID NO: | SEQ ID NO: |
| receptor substrate 2 | | 834 | 835 |
| // CEBPB // | NM_005194 | SEQ ID NO: | SEQ ID NO: |
| CCAAT/enhancer | | 836 | 837 |
| binding protein | | | |
| (C/EBP), beta | | | |
| // RGL3 // ral guanine | NM_001161616 | SEQ ID NO: | SEQ ID NO: |
| nucleotide dissociation | | 838 | 839 |
| stimulator-like 3 | | | |
| // HIPK2 // | NM_022740 | SEQ ID NO: | SEQ ID NO: |
| homeodomain | | 840 | 841 |
| interacting protein | | | |
| kinase 2 | | | |
| // SLC25A37 // solute | NM_016612 | SEQ ID NO: | SEQ ID NO: |
| carrier family 25, | | 842 | 843 |
| member 37 | | | |
| // NRIP1 // nuclear | NM_003489 | SEQ ID NO: | SEQ ID NO: |
| receptor interacting | | 844 | 845 |
| protein 1 | | | |
| // PION // pigeon | NM_017439 | SEQ ID NO: | SEQ ID NO: |
| homolog (Drosophila) | | 846 | 847 |
| // TGFBR2 // | NM_001024847 | SEQ ID NO: | SEQ ID NO: |
| transforming growth | | 848 | 849 |
| factor, beta receptor II | | | |
| (70/80 kDa) | | | |
| // UBE2CBP // | NM_198920 | SEQ ID NO: | SEQ ID NO: |
| ubiquitin-conjugating | | 850 | 851 |
| enzyme E2C binding | | | |
| protein | | | |
| // PCCA // propionyl | NM_000282 | SEQ ID NO: | SEQ ID NO: |
| Coenzyme A | | 852 | 853 |
| carboxylase, alpha | | | |
| polypeptide | | | |
| // TIMD4 // T-cell | NM_138379 | SEQ ID NO: | SEQ ID NO: |
| immunoglobulin and | | 854 | 855 |
| mucin domain | | | |
| containing 4 | | | |
| // NIACR1 // niacin | NM_177551 | SEQ ID NO: | SEQ ID NO: |
| receptor 1 | | 856 | 857 |
| — | | | |
| // IL28RA // interleukin | NM_170743 | SEQ ID NO: | SEQ ID NO: |
| 28 receptor, alpha | | 858 | 859 |
| (interferon, lambda | | | |
| receptor) | | | |
| // RARA // retinoic acid | NM_000964 | SEQ ID NO: | SEQ ID NO: |
| receptor, alpha | | 860 | 861 |
| // ACSL4 // acyl-CoA | NM_022977 | SEQ ID NO: | SEQ ID NO: |
| synthetase long-chain | | 862 | 863 |
| family member 4 | | | |
| // SGMS2 // | NM_001136258 | SEQ ID NO: | SEQ ID NO: |
| sphingomyelin | | 864 | 865 |
| synthase 2 | | | |
| // GMPR // guanosine | NM_006877 | SEQ ID NO: | SEQ ID NO: |
| monophosphate | | 866 | 867 |
| reductase | | | |
| // SKIL // SKI-like | NM_005414 | SEQ ID NO: | SEQ ID NO: |
| oncogene | | 868 | 869 |
| // HIP1 // huntingtin | NM_005338 | SEQ ID NO: | SEQ ID NO: |
| interacting protein 1 | | 870 | 871 |
| // EXOC5 // exocyst | NM_006544 | SEQ ID NO: | SEQ ID NO: |
| complex component 5 | | 872 | 873 |
| // ZC3H13 // zinc finger | NM_015070 | SEQ ID NO: | SEQ ID NO: |
| CCCH-type containing | | 874 | 875 |
| 13 | | | |
| // IMPAD1 // inositol | NM_017813 | SEQ ID NO: | SEQ ID NO: |
| monophosphatase | | 876 | 877 |
| domain containing 1 | | | |
| // SEPT4 // septin 4 | NM_080415 | SEQ ID NO: | SEQ ID NO: |
| | | 879 | 880 |
| // SLC1A5 // solute | NM_005628 | SEQ ID NO: | SEQ ID NO: |
| carrier family 1 (neutral | | 881 | 882 |
| amino acid | | | |
| transporter), member 5 | | | |
| // EML4 // echinoderm | NM_019063 | SEQ ID NO: | SEQ ID NO: |
| microtubule associated | | 883 | 884 |
| protein like 4 | | | |
| // ANPEP // alanyl | NM_001150 | SEQ ID NO: | SEQ ID NO: |
| (membrane) | | 885 | 886 |
| aminopeptidase | | | |
| // XG // Xg blood group | NM_001141919 | SEQ ID NO: | SEQ ID NO: |
| | | 887 | 888 |
| // PPP1R13B // protein | NM_015316 | SEQ ID NO: | SEQ ID |
| phosphatase 1, | | 889 | NO: 890 |
| regulatory (inhibitor) | | | |
| subunit 13B | | | |
| // IL1RAP // interleukin | NM_002182 | SEQ ID NO: | SEQ ID NO: |
| 1 receptor accessory | | 891 | 892 |
| protein | | | |
| // AR // androgen | NM_000044 | SEQ ID NO: | SEQ ID NO: |
| receptor | | 893 | 894 |
| // SLC25A33 // solute | NM_032315 | SEQ ID NO: | SEQ ID NO: |
| carrier family 25, | | 895 | 896 |
| member 33 | | | |
| // C11orf59 // | BC001706 | SEQ ID NO: | SEQ ID NO: |
| chromosome 11 open | | 897 | 898 |
| reading frame 59 | | | |
| // ABHD2 // | NM_007011 | SEQ ID NO: | SEQ ID |
| abhydrolase domain | | 899 | NO: 900 |
| containing 2 | | | |
| // DENND5A // | NM_015213 | SEQ ID NO: | SEQ ID NO: |
| DENN/MADD domain | | 901 | 902 |
| containing 5A | | | |
| // KCNJ15 // potassium | NM_002243 | SEQ ID NO: | SEQ ID NO: |
| inwardly-rectifying | | 903 | 904 |
| channel, subfamily J, | | | |
| member 15 | | | |
| // CHRNA5 // | NM_000745 | SEQ ID NO: | SEQ ID NO: |
| cholinergic receptor, | | 905 | 906 |
| nicotinic, alpha 5 | | | |
| // IRAK3 // interleukin-1 | NM_007199 | SEQ ID NO: | SEQ ID NO: |
| receptor-associated | | 907 | 908 |
| kinase 3 | | | |
| // SYTL4 // | NM_080737 | SEQ ID NO: | SEQ ID NO: |
| synaptotagmin-like 4 | | 909 | 910 |
| // SNORD38B // small | NR_001457 | SEQ ID NO: | N/A |
| nucleolar RNA, C/D | | 911 | |
| box 38B | | | |
| // LRRFIP1 // leucine | NM_001137550 | SEQ ID NO: | SEQ ID NO: |
| rich repeat (in FLII) | | 912 | 913 |
| interacting protein 1 | | | |
| // ZNF124 // zinc finger | NM_003431 | SEQ ID NO: | SEQ ID NO: |
| protein 124 | | 914 | 915 |
| // CLEC12A // C-type | NM_138337 | SEQ ID NO: | SEQ ID NO: |
| lectin domain family | | 916 | 917 |
| 12, member A | | | |
| // CBL // Cas-Br-M | NM_005188 | SEQ ID NO: | SEQ ID NO: |
| (murine) ecotropic | | 918 | 919 |
| retroviral transforming | | | |
| sequence | | | |
| // MMP14 // matrix | NM_004995 | SEQ ID NO: | SEQ ID NO: |
| metallopeptidase 14 | | 920 | 921 |
| (membrane-inserted) | | | |
| // CCDC23 // coiled- | NM_199342 | SEQ ID NO: | SEQ ID NO: |
| coil domain containing | | 922 | 923 |
| 23 | | | |
| // TBC1D2B // TBC1 | NM_144572 | SEQ ID NO: | SEQ ID NO: |
| domain family, | | 924 | 925 |
| member 2B | | | |
| // PAK1 // p21 protein | NM_001128620 | SEQ ID NO: | SEQ ID NO: |
| (Cdc42/Rac)-activated | | 926 | 927 |
| kinase 1 | | | |
| // PAQR5 // progestin | NM_001104554 | SEQ ID NO: | SEQ ID NO: |
| and adipoQ receptor | | 928 | 929 |
| family member V | | | |
| // BNC2 // basonuclin 2 | NM_017637 | SEQ ID NO: | SEQ ID NO: |
| | | 930 | 931 |
| // DENND1B // | NM_144977 | SEQ ID NO: | SEQ ID NO: |
| DENN/MADD domain | | 932 | 933 |
| containing 1B | | | |
| // PPP2R3A // protein | NM_002718 | SEQ ID NO: | SEQ ID NO: |
| phosphatase 2 | | 934 | 935 |
| (formerly 2A), | | | |
| regulatory subunit B″, | | | |
| alpha | | | |
| // ALDOC // aldolase | NM_005165 | SEQ ID NO: | SEQ ID NO: |
| C, fructose- | | 936 | 937 |
| bisphosphate | | | |
| // KCTD10 // | NM_031954 | SEQ ID NO: | SEQ ID NO: |
| potassium channel | | 938 | 939 |
| tetramerisation domain | | | |
| containing 10 | | | |
| // BIN2 // bridging | NM_016293 | SEQ ID NO: | SEQ ID NO: |
| integrator 2 | | 940 | 941 |
| // FAM82A2 // family | NM_018145 | SEQ ID NO: | SEQ ID NO: |
| with sequence | | 942 | 943 |
| similarity 82, member | | | |
| A2 | | | |
| // TNIP3 // TNFAIP3 | NM_024873 | SEQ ID NO: | SEQ ID NO: |
| interacting protein 3 | | 944 | 945 |
| // FGD4 // FYVE, | NM_139241 | SEQ ID NO: | SEQ ID NO: |
| RhoGEF and PH | | 946 | 947 |
| domain containing 4 | | | |
| // FAM89A // family | NM_198552 | SEQ ID NO: | SEQ ID NO: |
| with sequence | | 948 | 949 |
| similarity 89, member A | | | |
| // SNX10 // sorting | NM_013322 | SEQ ID NO: | SEQ ID NO: |
| nexin 10 | | 950 | 951 |
| // FBXO9 // F-box | AK095307 | SEQ ID NO: | N/A |
| protein 9 | | 952 | |
| // PLCB2 // | NM_004573 | SEQ ID NO: | SEQ ID NO: |
| phospholipase C, beta 2 | | 953 | 954 |
| // HACL1 // 2- | NM_012260 | SEQ ID NO: | SEQ ID NO: |
| hydroxyacyl-CoA lyase 1 | | 955 | 956 |
| // KIAA0564 // | NM_015058 | SEQ ID NO: | SEQ ID NO: |
| KIAA0564 | | 957 | 958 |
| // MNDA // myeloid cell | NM_002432 | SEQ ID NO: | SEQ ID NO: |
| nuclear differentiation | | 959 | 960 |
| antigen | | | |
| // ACOT11 // acyl-CoA | NM_147161 | SEQ ID NO: | SEQ ID NO: |
| thioesterase 11 | | 961 | 962 |
| // MAP3K8 // mitogen- | NM_005204 | SEQ ID NO: | SEQ ID NO: |
| activated protein | | 963 | 964 |
| kinase kinase kinase 8 | | | |
| // C5orf27 // | NR_026936 | SEQ ID NO: | N/A |
| chromosome 5 open | | 965 | |
| reading frame 27 | | | |
| // CD14 // CD14 | NM_000591 | SEQ ID NO: | SEQ ID NO: |
| molecule | | 966 | 967 |
| // FMNL2 // formin-like 2 | NM_052905 | SEQ ID NO: | SEQ ID NO: |
| | | 968 | 969 |
| // FMNL3 // formin-like 3 | NM_175736 | SEQ ID NO: | SEQ ID NO: |
| | | 970 | 971 |
| // PLEK // pleckstrin | NM_002664 | SEQ ID NO: | SEQ ID NO: |
| | | 972 | 973 |
| // CXCR7 // chemokine | NM_020311 | SEQ ID NO: | SEQ ID NO: |
| (C—X—C motif) receptor 7 | | 974 | 975 |
| // PLAUR // | NM_002659 | SEQ ID NO: | SEQ ID NO: |
| plasminogen activator, | | 976 | 977 |
| urokinase receptor | | | |
| // BTK // Bruton | NM_000061 | SEQ ID NO: | SEQ ID NO: |
| agammaglobulinemia | | 978 | 979 |
| tyrosine kinase | | | |
| // VAMP4 // vesicle- | NM_003762 | SEQ ID NO: | SEQ ID NO: |
| associated membrane | | 980 | 981 |
| protein 4 | | | |
| // CCIN // calicin | NM_005893 | SEQ ID NO: | SEQ ID NO: |
| | | 982 | 983 |
| // ACTN1 // actinin, | NM_001130004 | SEQ ID NO: | SEQ ID NO: |
| alpha 1 | | 984 | 985 |
| — | | | |
| // DHCR7 // 7- | NM_001360 | SEQ ID NO: | SEQ ID NO: |
| dehydrocholesterol | | 986 | 987 |
| reductase | | | |
| // SYT17 // | NM_016524 | SEQ ID NO: | SEQ ID NO: |
| synaptotagmin XVII | | 988 | 989 |
| // TECR // trans-2,3- | NM_138501 | SEQ ID NO: | SEQ ID NO: |
| enoyl-CoA reductase | | 990 | 991 |
| // SLC7A7 // solute | NM_003982 | SEQ ID NO: | SEQ ID NO: |
| carrier family 7 | | 992 | 993 |
| (cationic amino acid | | | |
| transporter, y+ | | | |
| system), member 7 | | | |
| // APOC1 // | NM_001645 | SEQ ID NO: | SEQ ID NO: |
| apolipoprotein C-I | | 994 | 995 |
| // ECHDC1 // enoyl | NM_001002030 | SEQ ID NO: | SEQ ID NO: |
| Coenzyme A | | 996 | 997 |
| hydratase domain | | | |
| containing 1 | | | |
| ACVRL1//activin A | NM_000020 | SEQ ID NO: | SEQ ID NO: |
| receptor type II-like 1 | | 1153 | 1154 |
| CASP9//caspase 9, | NM_001229 | SEQ ID NO: | SEQ ID NO: |
| apoptosis-related | | 1155 | 1156 |
| cysteine peptidase | | | |
| EGR2 //early growth | NM_000399 | SEQ ID NO: | SEQ ID NO: |
| response 2 | | 1157 | 1158 |
| FBN1//fibrillin 1 | NM_000138 | SEQ ID NO: | SEQ ID NO: |
| | | 1159 | 1160 |
| FFAR2//free fatty acid | NM_005306 | SEQ ID NO: | SEQ ID NO: |
| receptor 2 | | 1161 | 1162 |
| GPR82//G protein- | NM_080817 | SEQ ID NO: | SEQ ID NO: |
| coupled receptor 82 | | 1163 | 1164 |
| HCK //hemopoietic | NM_002110 | SEQ ID NO: | SEQ ID NO: |
| cell kinase | | 1165 | 1166 |
| SCARNA7//small | NR_003001 | SEQ ID NO: | N/A |
| Cajal body-specific | | 1167 | |
| RNA 7 | | | |
| SNORD34 //small | NR_000019 | SEQ ID NO: | N/A |
| nucleolar RNA, C | | 1168 | |
| SPN //sialophorin | NM_001030288 | SEQ ID NO: | SEQ ID NO: |
| | | 1169 | 1170 |
| TMEM163// | NM_030923 | SEQ ID NO: | SEQ ID NO: |
| transmembrane | | 1171 | 1172 |
| protein 163 | | | |
| TSPAN7//tetraspanin 7 | NM_004615 | SEQ ID NO: | SEQ ID NO: |
| | | 1173 | 1174 |
| ZMYND17// zinc | NM_001024593 | SEQ ID NO: | SEQ ID NO: |
| finger, MYND-type | | 1175 | 878 |
| containing 17 | | | |

[0158] In FIG. 1, the data show expression of the ratio of phosphorylated SMAD2 (pSMAD2) protein relative to total SMAD2 protein in BAL cells isolated from cynomolgus monkeys after 8-weekly doses of STX-100 treatment relative to circulating levels of STX-100 in serum after the last (8^{th}) weekly dose of antibody (area under the curve (AUC) ug*hr/ml). Data are shown for individual animals in vehicle and 0.1, 0.3, 1.0, 3.0, and 10 mg/kg STX-100 treatment groups. pSMAD2 and total SMAD2 levels were determined by ELISA analysis.

[0159] In FIG. 2, the data show expression of example genes a) ALOX5, b) OLR1, c) Serpine1, and d) TGM2 in BAL cells isolated from cynomolgus monkeys after 8-weekly doses of STX-100 treatment relative to circulating levels of STX-100 in serum after the last (8^{th}) weekly dose of antibody (area under the curve (AUC) ug*hr/ml). Data are shown for individual animals in vehicle and 0.1, 0.3, 1.0, 3.0, and 10 mg/kg STX-100 treatment groups. Gene expression was determined by Taqman® gene expression analysis.

### Example 2

### Quantitative Polymerase Chain Reaction Studies on Gene Expression Levels in BAL Macrophage Cells Following Injection of 3G9 Antibody in Mice

[0160] Wild type mice were either treated with 2 doses of 3G9 antibody at three different concentrations (i.e., 0.3 mg/kg, 1 mg/kg, or 3 mg/kg) 7 days apart or not treated (control). BAL macrophages were isolated from the mice 24 hours after the second dose and quantitative polymerase chain reaction was used to determine the expression level of Cathepsin L, Legumain, PAI-1 (also known as Serpine1), Osteopontin, TREM-1, MMP-19, and ALCAM.

[0161] 3G9 treatment did not significantly affect the expression of Cathepsin L or Legumain (FIGS. 3 and 4). However, 3G9 treatment increased the expression of MMP19 and ALCAM, and reduced the expression of osteopontin, TREM-1 and PAI-1 (FIGS. 5-9).

The application's sequence listing, which the Patent Office published only in electronic form, follows.

SEQUENCE LISTING (1211 sequences)

SEQ ID NO: 1 - DNA, 4386 bp, Homo sapiens
gggctccacggagtgaataggaggcggctcaggcttcctggctcgcgtgggcgccagaaagcggaacctcccgggccagtcgcgcggtggtcaccctcttgggagctggggaggaggctgcggaggctggcccggctccttcgggcgtcgcttcccggaccgggtgcgcggggtcccccggaacgtgtgttccaggtcctcccgcgccagtgttcgcagtccccgcctggtcgcggcggcgcctcgggcgcgggtgcaggcgcgcggcgcgcaggcggggggcgctgtggtcttggcgcggggaccgagccgctcggccagacccgcctcttttccctccccgccagcccgcccgcctgcccgccccccacgcgtcgtgtcgccgggaagccgggcggagacagagcgcttgggatccacggcgctcggaccgctgtcctccaacagcgcagggcagagcggctggcgccgccggagcgcggagccacgaccctccctggccgcctttgtctactggccgtgcggcccggaaccgccactctccagggccggggacgcgcccgcagctgtcggtgacagctcctccctaccgcaaccctccggggcggaggggcggtcgggccgggccctgctagcccgcgaccgcaagcccgcgctcgcggatcgatgcccccgcagcagggggaccccgcgttccccgaccgctgcgaggcgcctccggtgccgccgcgtcgggagcgcggtggacgcgggggacgcgggcctggggagccggggggccgggggcgtgcggggggtgccgaggggcgcggcgtcaagtgcgtgctggtcggcgacggcgcggtgggcaagacgagcctggtggtgagctacaccaccaacggctaccccaccgagtacatccctactgccttcgacaacttctccgcggtggtgtctgtggatgggcggcccgtgagactccaactctgtgacactgccggacaggatgaatttgacaagctgaggcctctctgctacaccaacacagacatcttcctgctctgcttcagtgtcgtgagcccctcatccttccagaacgtcagtgagaaatgggtgccggagattcgatgccactgtcccaaagcccccatcatcctagttggaacgcagtcggatctcagagaagatgtcaaagtcctcattgagttggacaaatgcaaagaaaagccagtgcctgaagaggcggctaagctgtgcgccgaggaaatcaaagccgcctcctacatcgagtgttcagccttgactcaaaaaaacctcaaagaggtctttgatgcagccatcgtcgctggcattcaatactcggacactcagcaacagccaaagaagtctaaaagcaggactccagataaaatgaaaaacctctccaagtcctggtggaagaagtactgctgtttcgtatgatgctggcaagacacccagaaaggctattttcagatgaaatcgatattagaagctatattagctgaaacaactccttttactgcgtagaacctatatcgagagtgtgtgtatatgtattataggaggagctctcaattttatgtattctttctgcctttaattttcttgtttgtttgagcttagggatgagatacttatgcaagatatttttgaagtaaattaaacatttttcacatctctggaaatttagagttctagacctctggttaatttatatctaatatgaagaagacacctctaatctggatgttaagaatgaagttctgctacattataatgtacagaagagcaaaagggaggaacactatggttaaccctctcttgattaagggctacttaatgcacagtgcattatgtacacaggtcaaccatggtaacaatagttcttagctttgaaactccatgcaaaccatgccttttttttaaggagcaaaaatctgagaaaaaaagtgagagacctctgcctacaaaacctcaaaccagtcacttttgtcaattgctaatacccagttacttatgatttaaaaacaaccaacagaaaacatcccactgactgtatggcactctgtagtcaaaaaaggaaacttccttattgggacttttctttcttagtccagttgtgttgacacatatgaacacagacaaagtgctatgcggaggaaagcaagtgttggtcagtagtttcatgttttagggagtggttcctgtggagatcagaaagtgacatttgctttcggtactgtaatacgtgcaccaaactgcctcaatcctaggtaacgagggcaacagggagcacctgtctggattgtttttaaacctccatactcaagctgtctcttcggcagggaggtgaatactcttgaaaggccaacagcaagtgtttgtgggacacaacacagataattttttcttaagtcggccaagatgtacttctctgtgtgcacacccatgcacactcatgcacacagatacataggtctgtatggctgtatttgctgttgattcagactttcacaccattaatggggaaaagcgtggccacaaaaacagatgctaggaagcttggcttcctcttcttgttgacccttttttgaaccaacatcttttttattatattcagagtatgtttttaagtgtatcttaatatatacattttttaggacatcttaaatctaaacaaaaaataaaatgaacatctcttgaaacctgttaaaacaaccagttaaagccacagatggctttcagggcagtagcagcagaggccagtggactctgaggactcctgaggggcggggcgtgtagccagccaggtgcatgccgggaccatggcccccatacttggctgcttcctgtgacagtgaaatacatccttcaaggtggcagctgttagggctgaatcttctggagaaaaaggtgccatctcaggagaatagcttttactctggtaggaatgcttccgagacaccacaaggcagcctgaacactcagttgcagggtcgggcttgcggtgggtgacccagagccaccaaagtcacatccacaactaatgagggaaatctgtaaagccagttagatagaagaattttatttttctgtgggttttgtgttgtcttttttatgttaaaaagaaatccagtttgtgtttttctatagaaaaagtaaaagatcaggttatactttaggttaggggttctatttattcctgttagtaaataaaattaacaaatttctttgtttaacaaaagattaatctttaaaccactaaaatacatagactgattgattattcaacacattggaattgatgtcggtcatagtttcctgaagcatttagttacaacctgaaggaataaaatgatttgtggaaatgcttaaaatagacctaactgaatacagtctcatcttgccgcgcctggcttacctatctgtggaaagctaggcttcccaggctgggctctgcctgtctggtgcctggaggtgtgggagggaagatgagttatttaactggtaagcgatttgaaacactatttttatattaaagtaaatggcatggagtatagtgcaaattcatttttaagatagaacacaaaacttgaaagaagttttatgcgtgtgacagtgtatggggctgcagttggtctccctggaggggacttccacacctcctgcctttaggccatgggtggaaagtgctcagtgaagtacacctgtgtggcccagttctgaaagctttatacagttgaattttaagtggggttgataacaccttggactgttagtgttaaaaatctagtgggttgacctttaaatgcaacagtttttaaaatatattgctgcattttatagaatagtaaaggtacgattatacttgagattttcctccatttttatttcttcgtgaacatagagtttggggccgaaaatgtttttaaagtatgtgtttgagttaaatataaagttggttcacttcaaagctaaaaaattgttaaacttgcagcttggtattgcagagaagattttataagaattttgctttagagaatgccactttggctgaactacaagtgtaggccaccattataatttataaatacagcatacttcaaaactgtttgttatctcttgttaccatgtatgtataaatggaccttttataaccttgttctctgcttgacagactcaagagaaactacccaggtattacacaagccaaaatgggagcaaggccttctctccagactatcgtaacctggtgccttaccaagttgtgcttttctgttttcaagtgtaaatgatgttgagcagaatgttgtacttgaaaatgctataagtgagatggtatgaaataaattctgacttatgaatataaaaaaaaaaaaaaaa

SEQ ID NO: 2 - protein, 258 aa, Homo sapiens
MPPQQGDPAFPDRCEAPPVPPRRERGGRGGRGPGEPGGRGRAGGAEGRGVKCVLVGDGAVGKTSLVVSYTTNGYPTEYIPTAFDNFSAVVSVDGRPVRLQLCDTAGQDEFDKLRPLCYTNTDIFLLCFSVVSPSSFQNVSEKWVPEIRCHCPKAPIILVGTQSDLREDVKVLIELDKCKEKPVPEEAAKLCAEEIKAASYIECSALTQKNLKEVFDAAIVAGIQYSDTQQQPKKSKSRTPDKMKNLSKSWWKKYCCFV

SEQ ID NO: 3 - DNA, 2369 bp, Homo sapiens
ccaagcgcgcggggcaaggcggccctgcaggggtgagctttcctctgagaacccggggccttagcgacacgtaatccagttttccgtctccttggtgcagatgaagaaaccgacgcccatgggcgaaagggacctgctcaagttcactcagtaagtcaggagataagccagaatgcgtatctgactccagtctcaatgtctaccccttcacaaaacggtagcctccagggtagtcctcagcaaagcgttggcaccttactgaatctgtttttccatctgagaaatgggccaacggaaaaatcaaacttccattctggggaagtcgagaaccgggactccctaggaagggcagtgctttggcctcatgttctgtgctctgacagagagctgcactagagacaagtttatccatgaacacattgctctgtaaaggaatgttttgcctactcagctgggaggccgacagcagaggcagacttggggagtacactctgcagcccctgtccctgcagactgaagagaccacagagctgggcagcaagaaggagctcaagtccatgcccttcatcacctacctctcaggtttgctgacagcccagatgctgtcagatgaccagctcatttcaggtgtggagattcgctgtgaggagaaggggcgctgtccatctacctgtcacctttgccgccggccaggcaaggagcagctgagccccacaccagtgctgctggaaatcaaccgtgtggtgccactttataccctcatccaagacaatggcacaaaggaggccttcaagagtgcactgatgagttcctactggtgctcagggaaaggggatgtgatcgatgactggtgcaggtgtgacctcagcgcctttgatgccaatgggctccccaactgcagcccccttctgcagccggtgctgcggctgtccccaacagtggagccctccagtactgtggtctccttggagtgggtggatgttcagccagctattgggaccaaggtctccgactatattctgcagcataagaaagtggatgaatacacagacactgacctgtacacaggagaattcctgagttttgctgatgacttactctctggcctgggcacatcttgtgtagcagctggtcgaagccatggagaggtccctgaagtcagtatctactcagtcatcttcaagtgtctggagcccgacggtctctacaagttcactctgtatgctgtggatacacgagggaggcactcagagctaagcacggtgaccctgaggacggcctgtccactggtagatgacaacaaggcagaagaaatagctgacaagatctacaatctgtacaatgggtacacaagtggaaaggagcagcagatggcctacaacacactgatggaggtctcagcctcgatgctgttccgagtccagcaccactacaactctcactatgaaaagtttggcgacttcgtctggagaagtgaggatgagctggggcccaggaaggcccacctgattctacggcgactggagagggtgagtagccactgctccagcctcctgcggagtgcctacatccagagccgcgtggaaacagtgccctatcttttctgccgcagcgaggaggtccggcctgcaggcatggtgtggtatagcatcctcaaggacaccaaaatcacgtgtgaggagaagatggtgtcaatggcccgaaacacgtacggggagtccaagggccggtgagggagggtattgccctccgtgagcacagagactctccatgggagggggagcagtattctcctggatcctggggcctgggtgggctgggggacagctgaggatgggcctagcagatgaagcttgccagcaaggccaaagcaaacggtttctcctgtggatagtggacagagacctttgtaaccaatggaattattcatttttctctatcttttattttttcaaagatattatttgactctatcaaaagtctctcctttttaaaccttttcttatggatggctgtcaatcccgaggcagaagttttcaggtggagaccaagcggcctttgctcttcttccttcttcctgccacactctgctttcttcctgccatggacccctggaggagacctatggagggacagttttgacctgacccctagaggagacagttttgacctcttcagcaccaggaaggaagctctgaggatggttgcagtgaggaagcatgggtctttaaggacttctctctcttttttgctggacattattgagtttgtgggaccctgcctcttcctgctacctgtgggtctgcccagagtccctgcaggcctgtccatgcattaaaaattcctattgtctctctttaaaaaaaaaa

SEQ ID NO: 4 - protein, 440 aa, Homo sapiens
MNTLLCKGMFCLLSWEADSRGRLGEYTLQPLSLQTEETTELGSKKELKSMPFITYLSGLLTAQMLSDDQLISGVEIRCEEKGRCPSTCHLCRRPGKEQLSPTPVLLEINRVVPLYTLIQDNGTKEAFKSALMSSYWCSGKGDVIDDWCRCDLSAFDANGLPNCSPLLQPVLRLSPTVEPSSTVVSLEWVDVQPAIGTKVSDYILQHKKVDEYTDTDLYTGEFLSFADDLLSGLGTSCVAAGRSHGEVPEVSIYSVIFKCLEPDGLYKFTLYAVDTRGRHSELSTVTLRTACPLVDDNKAEEIADKIYNLYNGYTSGKEQQMAYNTLMEVSASMLFRVQHHYNSHYEKFGDFVWRSEDELGPRKAHLILRRLERVSSHCSSLLRSAYIQSRVETVPYLFCRSEEVRPAGMVWYSILKDTKITCEEKMVSMARNTYGESKGR

SEQ ID NO: 5 - DNA, 2123 bp, homo sapiens
agagagagggacgcgagcgggatccaaacttccggtgcctgcagagctcggagcggcggaggcagagaccgaggctgcaccggcagaggctgcggggcggacgcgcgggccggcgcagccatggtgaagattagcttccagcccgccgtggctggcatcaagggcgacaaggctgacaaggcgtcggcgtcggcccctgcgccggcctcggccaccgagatcctgctgacgccggctagggaggagcagcccccacaacatcgatccaagagggggggctcagtgggcggcgtgtgctacctgtcgatgggcatggtcgtgctgctcatgggcctcgtgttcgcctctgtctacatctacagatacttcttccttgcgcagctggcccgagataacttcttccgctgtggtgtgctgtatgaggactccctgtcctcccaggtccggactcagatggagctggaagaggatgtgaaaatctacctcgacgagaactacgagcgcatcaacgtgcctgtgccccagtttggcggcggtgaccctgcagacatcatccatgacttccagcggggtctgactgcgtaccatgatatctccctggacaagtgctatgtcatcgaactcaacaccaccattgtgctgccccctcgcaacttctgggagctcctcatgaacgtgaagagggggacctacctgccgcagacgtacatcatccaggaggagatggtggtcacggagcatgtcagtgacaaggaggccctggggtccttcatctaccacctgtgcaacgggaaagacacctaccggctccggcgccgggcaacgcggaggcggatcaacaagcgtggggccaagaactgcaatgccatccgccacttcgagaacaccttcgtggtggagacgctcatctgcggggtggtgtgaggccctcctcccccagaaccccctgccgtgttcctcttttcttctttccggctgctctctggccctcctccttccccctgcttagcttgtactttggacgcgtttctatagaggtgacatgtctctccattcctctccaaccctgcccacctccctgtaccagagctgtgatctctcggtggggggcccatctctgctgacctgggtgtggcggagggagaggcgatgctgcaaagtgttttctgtgtcccactgtcttgaagctgggcctgccaaagcctgggcccacagctgcaccggcagcccaaggggaaggaccggttgggggagccgggcatgtgaggccctgggcaaggggatggggctgtgggggcggggcggcatgggcttcagaagtatctgcacaattagaaaagtcctcagaagctttttcttggagggtacactttcttcactgtccctattcctagacctggggcttgagctgaggatgggacgatgtgcccagggagggacccaccagagcacaagagaaggtggctacctgggggtgtcccagggactctgtcagtgccttcagcccaccagcaggagcttggagtttggggagtggggatgagtccgtcaagcacaactgttctctgagtggaaccaaagaagcaaggagctaggacccccagtcctgccccccaggagcacaagcagggtcccctcagtcaaggcagtgggatgggcggctgaggaacggggcaggcaaggtcactgctcagtcacgtccacgggggacgagccgtgggttctgctgagtaggtggagctcattgctttctccaagcttggaactgttttgaaagataacacagagggaaagggagagccacctggtacttgtccaccctgcctcctctgttctgaaattccatccccctcagcttaggggaatgcacctttttccctttccttctcacttttgcatgtttttactgatcattcgatatgctaaccgttctcagccctgagccttggagaggagggctgtaacgccttcagtcagtctctggggatgaaactcttaaatgctttgtatattttctcaattagatctcttttcagaagtgtctatagaacaataaaaatcttttacttctgaaaaaaaaaaaaaaaaaaaaaaaaaaaaaaaaaaaaaaaaaaaaaaaaaaa

SEQ ID NO: 6 - protein, 267 aa, homo sapiens
MVKISFQPAVAGIKGDKADKASASAPAPASATEILLTPAREEQPPQHRSKRGGSVGGVCYLSMGMVVLLMGLVFASVYIYRYFFLAQLARDNFFRCGVLYEDSLSSQVRTQMELEEDVKIYLDENYERINVPVPQFGGGDPADIIHDFQRGLTAYHDISLDKCYVIELNTTIVLPPRNFWELLMNVKRGTYLPQTYIIQEEMVVTEHVSDKEALGSFIYHLCNGKDTYRLRRRATRRRINKRGAKNCNAIRHFENTFVVETLICGVV

SEQ ID NO: 7 - DNA, 2047 bp, homo sapiens
gaacaaacgggatattcagcagtggcctgtggctgccagagcagctcctcaggggaaactaagcgtcgagtcagacggcaccataatcgcctttaaaagtgcctccgccctgccggccgcgtatcccccggctacctgggccgccccgcggcggtgcgcgcgtgagagggagcgcgcgggcagccgagcgccggtgtgagccagcgctgctgccagtgtgagcggcggtgtgagcgcggtgggtgcggaggggcgtgtgtgccggcgcgcgcgccgtggggtgcaaaccccgagcgtctacgctgccatgaggggcgcgaacgcctgggcgccactctgcctgctgctggctgccgccacccagctctcgcggcagcagtccccagagagacctgttttcacatgtggtggcattcttactggagagtctggatttattggcagtgaaggttttcctggagtgtaccctccaaatagcaaatgtacttggaaaatcacagttcccgaaggaaaagtagtcgttctcaatttccgattcatagacctcgagagtgacaacctgtgccgctatgactttgtggatgtgtacaatggccatgccaatggccagcgcattggccgcttctgtggcactttccggcctggagcccttgtgtccagtggcaacaagatgatggtgcagatgatttctgatgccaacacagctggcaatggcttcatggccatgttctccgctgctgaaccaaacgaaagaggggatcagtattgtggaggactccttgacagaccttccggctcttttaaaacccccaactggccagaccgggattaccctgcaggagtcacttgtgtgtggcacattgtagccccaaagaatcagcttatagaattaaagtttgagaagtttgatgtggagcgagataactactgccgatatgattatgtggctgtgtttaatggcggggaagtcaacgatgctagaagaattggaaagtattgtggtgatagtccacctgcgccaattgtgtctgagagaaatgaacttcttattcagtttttatcagacttaagtttaactgcagatgggtttattggtcactacatattcaggccaaaaaaactgcctacaactacagaacagcctgtcaccaccacattccctgtaaccacgggtttaaaacccaccgtggccttgtgtcaacaaaagtgtagacggacggggactctggagggcaattattgttcaagtgactttgtattagccggcactgttatcacaaccatcactcgcgatgggagtttgcacgccacagtctcgatcatcaacatctacaaagagggaaatttggcgattcagcaggcgggcaagaacatgagtgccaggctgactgtcgtctgcaagcagtgccctctcctcagaagaggtctaaattacattattatgggccaagtaggtgaagatgggcgaggcaaaatcatgccaaacagctttatcatgatgttcaagaccaagaatcagaagctcctggatgccttaaaaaataagcaatgttaacagtgaactgtgtccatttaagctgtattctgccattgcctttgaaagatctatgttctctcagtagaaaaaaaaatacttataaaattacatattctgaaagaggattccgaaagatgggactggttgactcttcacatgatggaggtatgaggcctccgagatagctgagggaagttctttgcctgctgtcagaggagcagctatctgattggaaacctgccgacttagtgcggtgataggaagctaaaagtgtcaagcgttgacagcttggaagcgtttatttatacatctctgtaaaaggatattttagaattgagttgtgtgaagatgtcaaaaaaagattttagaagtgcaatatttatagtgttatttgtttcaccttcaagcctttgccctgaggtgttacaatcttgtcttgcgttttctaaatcaatgcttaataaaatatttttaaaggattacagaacaaccaaaaaaaaaaaaaaaaaa

SEQ ID NO: 8 - protein, 415 aa, homo sapiens
MRGANAWAPLCLLLAAATQLSRQQSPERPVFTCGGILTGESGFIGSEGFPGVYPPNSKCTWKITVPEGKVVVLNFRFIDLESDNLCRYDFVDVYNGHANGQRIGRFCGTFRPGALVSSGNKMMVQMISDANTAGNGFMAMFSAAEPNERGDQYCGGLLDRPSGSFKTPNWPDRDYPAGVTCVWHIVAPKNQLIELKFEKFDVERDNYCRYDYVAVFNGGEVNDARRIGKYCGDSPPAPIVSERNELLIQFLSDLSLTADGFIGHYIFRPKKLPTTTEQPVTTTFPVTTGLKPTVALCQQKCRRTGTLEGNYCSSDFVLAGTVITTITRDGSLHATVSIINIYKEGNLAIQQAGKNMSARLTVVCKQCPLLRRGLNYIIMGQVGEDGRGKIMPNSFIMMFKTKNQKLLDALKNKQC

SEQ ID NO: 9 - DNA, 3309 bp, homo sapiens
ggcggagagaataaagcagaaagacaggaagaggaggtggagttctacagttagtgtggttttagtttttcctaagaagtggcgtggtttggggctttatatccgggaggagcatatgtacgcaaatcctggggcgtttgcaaacccggatccggggcgtctggccccatgcccggccgggcgtttgagggctactgccacgcagcgtttctggagcctgccggctggtgccctggtggcctttatctctgtccccctttgtcctctttatctcaggctctccaggaggccggggggcccactccgcctatcgctcccctcggctacgctgccacttcaatgccccgcaggtcgcgagctgctgttctttcgaaggcgtcggagaaccaggggcgtcccgcgccacctctgactcggagcagcgccgagcactgacgctcccgcccttgggcaaggacgccagtgcgcccgcgcgcgtccctctgcgcggcagcccgtcgcgggccctcaaggggaagcccaggccaggatggccccgggtcgcgcggtggccgggctcctgttgctggcggccgccggcctcggaggagtggcggaggggccagggctagccttcagcgaggatgtgctgagcgtgttcggcgcgaatctgagcctgtcggcggcgcagctccagcacttgctggagcagatgggagccgcctcccgcgtgggcgtcccggagcctggccagctgcacttcaaccagtgtttaactgctgaagagatcttttcccttcatggcttttcaaatgctacccaaataaccagctccaaattctctgtcatctgtccagcagtcttacagcaattgaactttcacccatgtgaggatcggcccaagcacaaaacaagaccaagtcattcagaagtttggggatatggattcctgtcagtgacgattattaatctggcatctctcctcggattgattttgactccactgataaagaaatcttatttcccaaagattttgaccttttttgtggggctggctattgggactcttttttcaaatgcaattttccaacttattccagaggcatttggatttgatcccaaagtcgacagttatgttgagaaggcagttgctgtgtttggtggattttacctacttttcttttttgaaagaatgctaaagatgttattaaagacatatggtcagaatggtcatacccactttggaaatgataactttggtcctcaagaaaaaactcatcaacctaaagcattacctgccatcaatggtgtgacatgctatgcaaatcctgctgtcacagaagctaatggacatatccattttgataatgtcagtgtggtatctctacaggatggaaaaaaagagccaagttcatgtacctgtttgaaggggcccaaactgtcagaaatagggacgattgcctggatgataacgctctgcgatgccctccacaatttcatcgatggcctggcgattggggcttcctgcaccttgtctctccttcagggactcagtacttccatagcaatcctatgtgaggagtttccccacgagttaggagactttgtgatcctactcaatgcagggatgagcactcgacaagccttgctattcaacttcctttctgcatgttcctgctatgttgggctagcttttggcattttggtgggcaacaatttcgctccaaatattatatttgcacttgctggaggcatgttcctctatatttctctggcagatatgtttccagagatgaatgatatgctgagagaaaaggtaactggaagaaaaaccgatttcaccttcttcatgattcagaatgctggaatgttaactggattcacagccattctactcattaccttgtatgcaggagaaatcgaattggagtaatagaaaatggaagatggtgttgttaataaaggcatttaatagataaaaacatctccaaaaaggattttgaagctgatcctatttagttaaaaagataattttgctttcaactgtaggtccagaaaactaattattggcatcagtctgtgaaatagtccattatttgttgttaaaaatgcttcaaaaggttttcagtgtcagtctgagatgcctggtatataggagcctttgggaaatacctatttttcagtattccatgcatattagatatcaccatgaagcaagagacatgcattctataatcatgtagacactcagactcaggggaaaatacaagttatatcctgaaagcctttaaaactctatggtaggatcaaagattcaaatggtttcagagaggttttatttcaattaatttgttctagtgctttcaagagcaagtacatcaaaatgtagaaggtaaaatgtatgcaacactaatataaattattccaagtctttaaggagccaaagaaaaaaaagatttctcacagctttttgttctgttttgtatttcaattaggaacttgcagtattattttgaaaaccattctaaaataataggagttaggaaataaataaagttttgctagccctgctaagttcaggcttagaggcttatcgctaagtataaacttcaccagattccacgaaaagctggatagctttttttctgacttatgttgtggttgcacccctcacaaatggcagaacagtatgtaaagctggtaacacctcggtttcagtgcaccatgtgtttgctttgtgaaggtgaagaatatgttggtttagagaaagaaattggatgtaattttatgcaatttacttttaaagacaaacataactatttagcagagaatattttaataaatgcaaaacaacagctggactgctgtacatcaaggacagattaactggaaaacatatgttccttatgtgtgatcgagagccattcagaaaagacttcctttgtgttcagcctatacttttccatatggtataccttgaaaaaaattagcacaccatggttatttttctaccttttataaaagacagagcctgtttactcatttagaagatagagaaaattggtctaaaattgaacatcctagattcacactcccaagtcacttaaggtgatttgatggtgaggaaaatgattgacaaagcccaacaatgatctcaggaattacattttccaacagaccaaaaaatgttttcatgtagcagcaatgcagatttggtgaatatttaatatatattttagtatgtatttcactttatgactgacaattaaaaaatattgtttggccaaatagtaaacacccttttgaaaccatgaaaaaaaaaaaaaaaaa

SEQ ID NO: 10 - protein, 460 aa, homo sapiens
MAPGRAVAGLLLLAAAGLGGVAEGPGLAFSEDVLSVFGANLSLSAAQLQHLLEQMGAASRVGVPEPGQLHFNQCLTAEEIFSLHGFSNATQITSSKFSVICPAVLQQLNFHPCEDRPKHKTRPSHSEVWGYGFLSVTIINLASLLGLILTPLIKKSYFPKILTFFVGLAIGTLFSNAIFQLIPEAFGFDPKVDSYVEKAVAVFGGFYLLFFFERMLKMLLKTYGQNGHTHFGNDNFGPQEKTHQPKALPAINGVTCYANPAVTEANGHIHFDNVSVVSLQDGKKEPSSCTCLKGPKLSEIGTIAWMITLCDALHNFIDGLAIGASCTLSLLQGLSTSIAILCEEFPHELGDFVILLNAGMSTRQALLFNFLSACSCYVGLAFGILVGNNFAPNIIFALAGGMFLYISLADMFPEMNDMLREKVTGRKTDFTFFMIQNAGMLTGFTAILLITLYAGEIELE

SEQ ID NO: 11 - DNA, 5816 bp, homo sapiens
attataacagccaatgcagccgccatccacgcacaagcaaagaagcatgtcccatttaaatacacccacgcagccccagcgcccttagccgatcggggcgctcagcccacacgcaccgctgctcggggcttggagatccgcgcaggctgggctcccggacccggcggaccgacgcgcggaggatcgggatccggcgctgtggggctggggtgggcgggggaggctgggcccggggcctctggcgcgacacccgcatgaggacgcgagtgaaatagaccaaggtggaatttccaagggaaaagcttcggggtggttttggtccatttctccagcgaagaagtagacatggcgagcgactccccggctcgaagcctggatgaaatagatctctcggctctgagggaccccgcagggatctttgaattggtggaacttgttggaaatggaacatacgggcaagtttataagggtcgtcatgtcaaaacgggccagcttgcagccatcaaggttatggatgtcacaggggatgaagaggaagaaatcaaacaagaaattaacatgttgaagaaatattctcatcaccggaatattgctacatactatggtgcttttatcaaaaagaacccaccaggcatggatgaccaactttggttggtgatggagttttgtggtgctggctctgtcaccgacctgatcaagaacacaaaaggtaacacgttgaaagaggagtggattgcatacatctgcagggaaatcttacgggggctgagtcacctgcaccagcataaagtgattcatcgagatattaaagggcaaaatgtcttgctgactgaaaatgcagaagttaaactagtggactttggagtcagtgctcagcttgatcgaacagtgggcaggaggaatactttcattggaactccctactggatggcaccagaagttattgcctgtgatgaaaacccagatgccacatatgatttcaagagtgacttgtggtctttgggtatcaccgccattgaaatggcagaaggtgctccccctctctgtgacatgcaccccatgagagctctcttcctcatcccccggaacccagcgcctcggctgaagtctaagaagtggtcaaaaaaattccagtcatttattgagagctgcttggtaaagaatcacagccagcgaccagcaacagaacaattgatgaagcatccatttatacgagaccaacctaatgagcgacaggtccgcattcaactcaaggaccatattgatagaacaaagaagaagcgaggagaaaaagatgagacagagtatgagtacagtggaagtgaggaagaagaggaggagaatgactcaggagagcccagctccatcctgaatctgccaggggagtcgacgctgcggagggactttctgaggctgcagctggccaacaaggagcgttctgaggccctacggaggcagcagctggagcagcagcagcgggagaatgaggagcacaagcggcagctgctggccgagcgtcagaagcgcatcgaggagcagaaagagcagaggcggcggctggaggagcaacaaaggcgagagaaggagctgcggaagcagcaggagagggagcagcgccggcactatgaggagcagatgcgccgggaggaggagaggaggcgtgcggagcatgaacaggaatacatcaggcgacagttagaggaggagcagagacagttagagatcttgcagcagcagctactgcatgaacaagctctacttctggaatataagcgcaaacaattggaagaacagagacaagcagaaagactgcagaggcagctaaagcaagaaagagactacttagtttcccttcagcatcagcggcaggagcagaggcctgtggagaagaagccactgtaccattacaaagaaggaatgagtcctagtgagaagccagcatgggccaaggaggtagaagaacggtcaaggctcaaccggcaaagttcccctgccatgcctcacaaggttgccaacaggatatctgaccccaacctgcccccaaggtcggagtccttcagcattagtggagttcagcctgctcgaacaccccccatgctcagaccagtcgatccccagatcccacatctggtagctgtaaaatcccagggacctgccttgaccgcctcccagtcagtgcacgagcagcccacaaagggcctctctgggtttcaggaggctctgaacgtgacctcccaccgcgtggagatgccacgccagaactcagatcccacctcggaaaatcctcctctccccactcgcattgaaaagtttgaccgaagctcttggttacgacaggaagaagacattccaccaaaggtgcctcaaagaacaacttctatatccccagcattagccagaaagaattctcctgggaatggtagtgctctgggacccagactaggatctcaacccatcagagcaagcaaccctgatctccggagaactgagcccatcttggagagccccttgcagaggaccagcagtggcagttcctccagctccagcacccctagctcccagcccagctcccaaggaggctcccagcctggatcacaagcaggatccagtgaacgcaccagagttcgagccaacagtaagtcagaaggatcacctgtgctcccccatgagcctgccaaggtgaaaccagaagaatccagggacattacccggcccagtcgaccagctagctacaaaaaagctatagatgaggatctgacggcattagccaaagaactaagagaactccggattgaagaaacaaaccgcccaatgaagaaggtgactgattactcctcctccagtgaggagtcagaaagtagcgaggaagaggaggaagatggagagagcgagacccatgatgggacagtggctgtcagcgacatacccagactgataccaacaggagctccaggcagcaacgagcagtacaatgtgggaatggtggggacgcatgggctggagacctctcatgcggacagtttcagcggcagtatttcaagagaaggaaccttgatgattagagagacgtctggagagaagaagcgatctggccacagtgacagcaatggctttgctggccacatcaacctccctgacctggtgcagcagagccattctccagctggaaccccgactgagggactggggcgcgtctcaacccattcccaggagatggactctgggactgaatatggcatggggagcagcaccaaagcctccttcaccccctttgtggaccccagagtataccagacgtctcccactgatgaagatgaagaggatgaggaatcatcagccgcagctctgtttactagcgaacttcttaggcaagaacaggccaaactcaatgaagcaagaaagatttcggtggtaaatgtaaacccaaccaacattcggcctcatagcgacacaccagaaatcagaaaatacaagaaacgattcaactcagaaatactttgtgcagctctgtggggtgtaaaccttctggtggggactgaaaatggcctgatgcttttggaccgaagtgggcaaggcaaagtctataatctgatcaaccggaggcgatttcagcagatggatgtgctagagggactgaatgtccttgtgacaatttcaggaaagaagaataagctacgagtttactatctttcatggttaagaaacagaatactacataatgacccagaagtagaaaagaaacaaggctggatcactgttggggacttggaaggctgtatacattataaagttgttaaatatgaaaggatcaaatttttggtgattgccttaaagaatgctgtggaaatatatgcttgggctcctaaaccgtatcataaattcatggcatttaagtcttttgcagatctccagcacaagcctctgctagttgatctcacggtagaagaaggtcaaagattaaaggttatttttggttcacacactggtttccatgtaattgatgttgattcaggaaactcttatgatatctacataccatctcatattcagggcaatatcactcctcatgctattgtcatcttgcctaaaacagatggaatggaaatgcttgtttgctatgaggatgagggggtgtatgtaaacacctatggccggataactaaggatgtggtgctccaatggggagaaatgcccacgtctgtggcctacattcattccaatcagataatgggctggggcgagaaagctattgagatccggtcagtggaaacaggacatttggatggagtatttatgcataagcgagctcaaaggttaaagtttctatgtgaaagaaatgataaggtattttttgcatccgtgcgatctggaggaagtagccaagtgtttttcatgaccctcaacagaaattccatgatgaactggtaacagaagagcacttggcacttatcttcatggcgttatttctaatttaaaagaacataactcatgtggacttatgccagtctagaggcagaatcagaaggcttggttgaacatatcgctttccctttttcctctccctccgcccctcccagtacagtccatctttcaatgttgcagcctggttgagaaggagagaaaaaggtggcaggaatttccaggagatccccaagaatgctgccttgtctgtggacaaagatggaccatgtgcccttcggaattagggatagaaacaaatattgtgtgctcttaacgattaagctgtgttatggtgggttttcaggtttttaccttttttctttacccctttactctgcaagaatggggaaagaatgcatactgcgaaaatgagtcttttaaattctgtctgcctactagttttaagtatatggtatgttgtaaaatttccaatgatgagagacagcacaataaatgtaccttatctccttaggctgaaggccataactacatagtggagtaatttaagaactctcttgccttcaccaacccaaaaggttgctttttgatagcaactggctaatgaatttttaaaaagagaagaaaaatactagttttcccctcttttgggaaatagattttaaatggctaaactactagccttaaaactactagtctaataaaatcaactaccacttttgtgaatctgacaggccacatttttatatggccctttacagaatggagtgtgttgaacaggatactaacgccattgagttgagctggcctagcgatggagggacactctaacacaactttccctcagctattatgcaacagatcagggaaaaagatgggatgacagatggggtcagacagaaagagcttctgggaaacaagcttacatagtcttttttaaaatgcacaaagcctcccagctaagaggtcacttggtttgggcttcattaggactgagactttgttgagttctttctgggacttggagagtggatgatattcaggctctgaacattcccagcgctctcccgagggtgccactttctcaagatgaaaactgtgactgaaaaaattaataataaatgtttctgagctgcctgtgttctccctgtgtgggtgagagaagggactagactcctaagcctgcctcagatacaagaggcatcattggctccaattttagagaacttgaaagcaaggctttggacaaaattttgagaccctaatcactttaccttcctccaaattacccaacatacggtaaacaacatttgtgcagaagtatgtatgtatttagttcaggttgacttgtgtccttataaactcttactcaaatgatttgaactttaaaaaaaaaa

SEQ ID NO: 12 - protein, 1360 aa, homo sapiens
MASDSPARSLDEIDLSALRDPAGIFELVELVGNGTYGQVYKGRHVKTGQLAAIKVMDVTGDEEEEIKQEINMLKKYSHHRNIATYYGAFIKKNPPGMDDQLWLVMEFCGAGSVTDLIKNTKGNTLKEEWIAYICREILRGLSHLHQHKVIHRDIKGQNVLLTENAEVKLVDFGVSAQLDRTVGRRNTFIGTPYWMAPEVIACDENPDATYDFKSDLWSLGITAIEMAEGAPPLCDMHPMRALFLIPRNPAPRLKSKKWSKKFQSFIESCLVKNHSQRPATEQLMKHPFIRDQPNERQVRIQLKDHIDRTKKKRGEKDETEYEYSGSEEEEEENDSGEPSSILNLPGESTLRRDFLRLQLANKERSEALRRQQLEQQQRENEEHKRQLLAERQKRIEEQKEQRRRLEEQQRREKELRKQQEREQRRHYEEQMRREEERRRAEHEQEYIRRQLEEEQRQLEILQQQLLHEQALLLEYKRKQLEEQRQAERLQRQLKQERDYLVSLQHQRQEQRPVEKKPLYHYKEGMSPSEKPAWAKEVEERSRLNRQSSPAMPHKVANRISDPNLPPRSESFSISGVQPARTPPMLRPVDPQIPHLVAVKSQGPALTASQSVHEQPTKGLSGFQEALNVTSHRVEMPRQNSDPTSENPPLPTRIEKFDRSSWLRQEEDIPPKVPQRTTSISPALARKNSPGNGSALGPRLGSQPIRASNPDLRRTEPILESPLQRTSSGSSSSSSTPSSQPSSQGGSQPGSQAGSSERTRVRANSKSEGSPVLPHEPAKVKPEESRDITRPSRPASYKKAIDEDLTALAKELRELRIEETNRPMKKVTDYSSSSEESESSEEEEEDGESETHDGTVAVSDIPRLIPTGAPGSNEQYNVGMVGTHGLETSHADSFSGSISREGTLMIRETSGEKKRSGHSDSNGFAGHINLPDLVQQSHSPAGTPTEGLGRVSTHSQEMDSGTEYGMGSSTKASFTPFVDPRVYQTSPTDEDEEDEESSAAALFTSELLRQEQAKLNEARKISVVNVNPTNIRPHSDTPEIRKYKKRFNSEILCAALWGVNLLVGTENGLMLLDRSGQGKVYNLINRRRFQQMDVLEGLNVLVTISGKKNKLRVYYLSWLRNRILHNDPEVEKKQGWITVGDLEGCIHYKVVKYERIKFLVIALKNAVEIYAWAPKPYHKFMAFKSFADLQHKPLLVDLTVEEGQRLKVIFGSHTGFHVIDVDSGNSYDIYIPSHIQGNITPHAIVILPKTDGMEMLVCYEDEGVYVNTYGRITKDVVLQWGEMPTSVAYIHSNQIMGWGEKAIEIRSVETGHLDGVFMHKRAQRLKFLCERNDKVFFASVRSGGSSQVFFMTLNRNSMMNW

SEQ ID NO: 13 - DNA, 2133 bp, homo sapiens
cgggccaatcgttagtcagagtgggcggagccgcccgcgggcacctgcgcgttaagagtgggccgcgtcgctgaggggtagcgatgcgggctccggggatgaggtcgcggccggcgggtcccgcgctgttgctgctgctgctcttcctcggagcggccgagtcggtgcgtcgggcccagcctccgcgccgctacaccccagactggccgagcctggattctcggccgctgccggcctggttcgacgaagccaagttcggggtgttcatccactggggcgtgttctcggtgcccgcctggggcagcgagtggttctggtggcactggcagggcgaggggcggccgcagtaccagcgcttcatgcgcgacaactacccgcccggcttcagctacgccgacttcggaccgcagttcactgcgcgcttcttccacccggaggagtgggccgacctcttccaggccgcgggcgccaagtatgtagttttgacgacaaagcatcacgaaggcttcacaaactggccgagtcctgtgtcttggaactggaactccaaagacgtggggcctcatcgggatttggttggtgaattgggaacagctctccggaagaggaacatccgctatggactataccactcactcttagagtggttccatccactctatctacttgataagaaaaatggcttcaaaacacagcattttgtcagtgcaaaaacaatgccagagctgtacgaccttgttaacagctataaacctgatctgatctggtctgatggggagtgggaatgtcctgatacttactggaactccacaaattttctttcatggctctacaatgacagccctgtcaaggatgaggtggtagtaaatgaccgatggggtcagaactgttcctgtcaccatggaggatactataactgtgaagataaattcaagccacagagcttgccagatcacaagtgggagatgtgcaccagcattgacaagttttcctggggctatcgtcgtgacatggcattgtctgatgttacagaagaatctgaaatcatttcggaactggttcagacagtaagtttgggaggcaactatcttctgaacattggaccaactaaagatggactgattgttcccatcttccaagaaaggcttcttgctgttgggaaatggctgagcatcaatggggaggctatctatgcctccaaaccatggcgggtgcaatgggaaaagaacacaacatctgtatggtatacctcaaagggatcggctgtttatgccatttttctgcactggccagaaaatggagtcttaaaccttgaatcccccataactacctcaactacaaagataacaatgctgggaattcaaggagatctgaagtggtccacagatccagataaaggtctcttcatctctctaccccagttgccaccctctgctgtccccgcagagtttgcttggactataaagctgacaggagtgaagtaatcatttgagtgcaagaagaaagaggcgctgctcactgttttcctgcttcagtttttctcttatagtaccatcactataatcaacgaacttctcttctccacccagagatggcttttccaacacattttaattaaaggaactgagtacattaccctgatgtctaaatggaccaaagatctgagatccattgtgattatatctgtatcaggtcagcagaagaaggaactgagcagttgaactctgagttcatcaattgtaatatttggaaattatctacaatggaatcttccctctgttctctgataacctacttgcttactcaatgcctttaagccaagtcaccctgttgcctatgggaggaggtggaaggatttggcaagctcaaccacatgctatttagttagcatcagttgtcaccaacagtctttctgcaaagggcaggagagctttgggggaaaggaaaaggcttaccaggctgctatggtcaactcttcagaaattttcagagcaatctaaaagcgccaaaattcgctatgtttacagtgatactattaagaaaatgaatgtgattctgctctgtctttttaagtatgatcaaataaaaaatttgtacatcacaatcatttctaccaaaaaaaaaaaaaaaaaa

SEQ ID NO: 14 - protein, 466 aa, homo sapiens
MRAPGMRSRPAGPALLLLLLFLGAAESVRRAQPPRRYTPDWPSLDSRPLPAWFDEAKFGVFIHWGVFSVPAWGSEWFWWHWQGEGRPQYQRFMRDNYPPGFSYADFGPQFTARFFHPEEWADLFQAAGAKYVVLTTKHHEGFTNWPSPVSWNWNSKDVGPHRDLVGELGTALRKRNIRYGLYHSLLEWFHPLYLLDKKNGFKTQHFVSAKTMPELYDLVNSYKPDLIWSDGEWECPDTYWNSTNFLSWLYNDSPVKDEVVVNDRWGQNCSCHHGGYYNCEDKFKPQSLPDHKWEMCTSIDKFSWGYRRDMALSDVTEESEIISELVQTVSLGGNYLLNIGPTKDGLIVPIFQERLLAVGKWLSINGEAIYASKPWRVQWEKNTTSVWYTSKGSAVYAIFLHWPENGVLNLESPITTSTTKITMLGIQGDLKWSTDPDKGLFISLPQLPPSAVPAEFAWTIKLTGVK

SEQ ID NO: 15 - DNA, 12957 bp, homo sapiens
gaaaacaactcacgaggcaaaaaagtacatctcgtggatggagcagggcgaagtggttacaagtacagactctggagccagactgcctgggtttgaattgtgcggtttcagatttctgcctggcagattaaccaacggcaagagaggctgatctgtctacattctgagtactgcccttggcaagacacctagaacagaccctggacccaagtctaccgtactaccatacccctactccagcccaccccagacagtattctggggttcacctgaggtcagcagtgtgaagatgaccagtgcctttttagcatgacgactttggaccatgtgattgccacccaccagtcagaatgggtctccttcaatgaagagccaccctttcctgcccactcgcaggggggcacggaagagcacctcccaggactgtcatcttccccagaccagtccgagagctcctccggggagaaccatgtggtggatggaggctctcaagaccattcccactcggagcaggatgactcctctgaaaagatgggcctcatctctgaagcagcttccccacctgggagccctgagcagcccccacctgacctggcctcggccatcagcaactgggttcagtttgaagatgacacaccctgggccagcacatctccacctcatcaggaaacagctgagacagccctaccattgaccatgccctgctggacatgcccttcctttgactccctggggagatgccctctgacttctgagagcagctggaccacccattctgaagacaccagcagtcctagctttggatgttcgtatacagatctgcagctcatcaatgctgaggagcagacgagtggccaggcttctggggctgactcaactgacaattcctcctcgcttcaagaagatgaagaagtagagatggaggccatcagctggcaggccagcagtccagccatgaatgggcaccctgcccctccagtgacctctgctcgttttcccagctgggtcacctttgatgacaatgaagtcagctgccctttaccaccagtcacctctcctctgaagccaaatacaccaccaagtgcatctgtgatcccagatgtaccttataattcaatgggatcatttaagaagagggaccgtcccaagagcactttgatgaacttctccaaagttcagaagctggatatttcctctttaaaccgcacgccttctgtaactgaggcttcaccttggagggcaaccaaccctttcctgaatgagactctgcaggatgtacagccctcccctatcaaccctttcagtgctttctttgaggagcaggagaggcgctcccaaaacagttccatttccagtaccacgggcaaaagccaaagagattccctcattgtcatctaccaggatgccatcagttttgatgattcaagcaaaacccagtcacactctgatgctgttgaaaaactcaaacaactccaaattgatgaccctgatcactttggcagtgcaactctacctgatgatgacccagtagcctggattgaactagatgctcacccgcctggatcagcacggtcccagcctcgtgacgggtggccaatgatgttgaggatccctgagaagaaaaacatcatgtcctccaggcactggggaccgatcttcgtcaaactgacagacactggttacctgcagctgtattatgagcagggcctagaaaaaccattccgtgagttcaagctggagatctgtcatgagatttcagaaccccggcttcaaaactatgatgagaatggcagaatccacagcttgcggatagaccgtgtcacctataaagagaagaagaaataccagcccaaacctgctgtggcccacacagcagagagggaacaggtgattaagctgggcaccaccaattacgatgacttcctgagtttcatccatgcagttcaggaccgtctcatggatctgccagtgttgtcaatggacttgagcacagttggcctcaactaccttgaagaggagattacagtggatgtcagagatgaattctctggcattgtgagcaaaggagacaaccagattctccagcaccatgtcttgacacggatccacatcctgagtttcctgtctgggctcgcagagtgccgcctgggcctcaatgacatcctcgtcaaagggaatgaaatagttttgaggcaggacatcatgcccaccaccaccacaaagtggatcaagctccatgagtgccgtttccatgggtgtgtggatgaggatgttttccacaactcacgggtcattctgttcaaccctttggatgcgtgccggtttgagctaatgcggttcaggacagtgtttgctgagaagaccttgcctttcacactcaggacggccacaagtgtcaatggggcagaggtggaggtgcagagctggctgaggatgtcaactggcttctccgccaatcgtgaccccctcactcaggttccctgtgagaatgtgatgatccgttaccctgtgcccagtgagtgggtgaaaaacttccgcagggaaagtgtcctgggggaaaagtctttgaaagccaaagtgaaccggggggcaagttttggctccactagtgtttctggctctgagcctgtcatgagagtaactctgggaactgccaagtacgagcatgccttcaactccattgtgtggaggataaaccgactgccggacaaaaactcagcttccggtcacccacactgtttcttttgccaccttgaactcggctctgaccgggaagtgccttccagatttgccaatcacgtgaatgtcgagttcagcatgcccacaacttctgcctccaaagccagcgtgagatctatctctgtagaagacaagactgacgtcaggaagtgggtcaattattctgcacactacagctaccaggtagccttgggaagcatctggctaatgcttccaactccatttgttcaccccactaccctccccctcttattccttttagccatgcttactatgttcgcctggtaacctcttactgccttagaggaagttcaccatacatagctgtgggtgcgtctgctctgatttaaatgcataatctggctagtggatgagagaaaggttggaaaaaaataaagaggctcatcaaagaggagaatataatgtctttctgtcattatgagcaatgacaacaaaaagaataatgggggccaggcacagtggctcacacctgtaatcccagcactttgggaggtggaggtgggctgattacttgagttcaggagttcaagaccagcctggccaacatggcgaaaccccatctctataaaaagtacaaaattagccgggcatggtggcctgtgcatgtagtccagctactcaggagactgaggtgggaggatcacttgactctgggaggttgagctgcagtgagccatgattgcaccactgtactccagcctgagtgacagagcgagactgtgtctcaaaaaaagaaaaagagtaatggggtaaaggaattgttattattcatttgcaatataatttatgtcacagagtagtgagcttggaaatggaggggagaaaatgctatcccaaagcatatgcttcagttagagttgatgaagtggacctgaacaaagttaggacacacatgacctgggtactgggctataacaggacaaaactcaaaagccaagcaaatgtttataatagtaacagggtcagggctgtggaaggaatcataaaagttggagttttctgacataaatagaaagtgatactttcctggggagttagaaattcaataggagattaaatgccaacgattggaaaaggagtttgttaaagaaggattttgcaaagtggttttctatttataataatatccttggatttatatggtgatttattgttcctctaaatgtttccttagctgtgtgggctaaaatatttaactaccaaaaggaacaaacactccatcttgtggctaggaaaaaaatagcacctccctcaaacctgactgttgtgtgttgaatcattaccctgtaggtcaagcgtcataaatatccagagtggtgctgagaggagcaacctgaaccctgagctcaaagaattccttgcctgagctatcaaagatttcggttgagatgtattactttcaaagattaatctgttaatttcttgataattacagtgacagtattttgcagaagatattgcagaactgtaaacattccagtatttatcagttcggaggttttctaaagagagaaagtactggaggtggccgggtgctgtggctcatggctgtaatcccagacctttgggaggccaaggcaggtggatcatttgaggtcaggaattcaagaacagcctggccaatatggtgaaaccctgtccctactaaaaattcaaaaattagccaggcgcagtggtgcgtgcctgtaatcttagctactctggaggatgaggcaggagaatcacttgagcccgggaagtggaggttgcggtgagctgtgagccaagattgtgccagtgcactccggtctgagtaacagaatgagaccctgtctcaaaaaaagaaaaaaacaagtattgagggggtacaaacagtcaattacaaagaaattcattcatttgataaatctttgtcgattgcccactgtattcctacattattgcataaaatattgaacaagatcctgcccatgtcttgtggagcccatggtatagtggagccagacaggtgtgcaagatacggtggaaatattcacagagagaagtacctaagtctacttaataagtcaaaaatagcttcacagaaggggtgatctttgaccaaatgtacaaggcaaagaataagaattttcctggtggaccatgagggaaagggaattacagaccagttaaagaacatgtgcaaagagagagacatgatatactcagggccagtagctccaatgtggctaacgcccaaaatgttagcaaaattataagaaatttcaaagtacctatggagttttggtttacttatttatttgcatgctttttctcttctttttgatctttatctccaacttctattcttggcaggtggaaattgagcaaaaaaagagtttgaagccggactttgaaggagatgaaatggaaaatcccaaggagtgtggagtgcagtgacaaagccttgcggcaaggaatcctgatcccagagtcatgatagggtgtcttcctgagtcatgatagggtgtcttcctgagtagctgaagttgcagtcaatacctgctgtggccactgcatgttgggaacagtataccagatcttcctgtttgcagttacttgtattttaccaggaaaccctgagaatggtggcttttggagaggctctttgattctggtcatgcctaaagcacgaggttcacctgactgttggagcttactgtataattaagcctccttgtcttgtctctgcttatctcacagcactggtatgtggtttgttgtgactgttacagtcaggaaaagaacctcccacatcagtgttagcacgattgccttctgatgttcatctgtcactcgcataactttctggcaaaggcagtcttgagaagttaattaagaatccatctctttcactctgtctagaaaaggttcagaaaaggtgcaaaacaaatttcctctttgggtcttactagacctttttgaggtgtctccattctttaactgttaagctttcaagacatttccctcctggctctagatcgtttagattggaacactttttccatctctctaaggtttcagtcacaggatttgctatcctgagtcacaatagacaatggaaaaaggcacaataggagactttttaattttgtgaatggacccacattctgcaaaatgggtgttgaggggaaggcaaaattaatcttagttttcttcattttggagaaaagagacattaaatataagatgatgttcagttcaagaggtagattcaatctcagtgaattcccaaattcacactgaaaaatacagtccacttctgattcctgaaacaaatatacataatacctgaggcatttgtaaggggcatttgggagttctttttatacctcatgaccaatagacagttgcatgtccctttaacccaactttataggaaatttaagctgcaaagataatttttaaagctgttttaaaattaagcttgaatgagctttcccccaaaattcagagtttgataatcacagtattggattggattgaaaaggcatctctagggtagagacgtggaaaagccatatttttctaatgttgggaacattatattctgattccaagagtcagaacgctcactccatcttctttttcttcatctgtttctgggacaattaatcttcttttccttcatccgttcctactcacctctgcttcttatttgtatcttagtgttttctcccatgaagaatacaagtcgggggacagaaagcacacttcattggatttgtagatgatgcagaaatgaaaaatatctccagtttttggctgatggattcaagattaatgtattcaatgaacaatcattggagtctaaatgtgtattgacactgggatatagaaatagttacagtattttgaaatatctgaactaagactgaaagtaaaatgatgattgaataggcattaatgagaaaccctatattctgggtttttaaaatgcaaccctctaagtacagagtggagtgtgtgtttgtggatgtgtgtgtttgtgtgtgtttatgtgtgtggtgttgatgggaacggtgttaggaagacctggtttcacggtagtttatagagaaatatttccttacagaaatggaggttcaatgttgaatcagaaatatatcatggctattcacaaagctaatgtagtcagctggtgttaataaaagccttacatgcttttattaaccctccatctagtccatatctaaatggagggttgagttcaattatgggtatcatattttaagagagacattaataagttgattgtgtccatagggaggtgaccagggttgtaaagggtctgatgatgcaagaacaagggagtagcttccctgaaggaacagaaggtatagctggaaagggagtgcagacaaggagggaatgatacaatagctgcctagaaatttctattgagctatgaaaaggaagaggaattagatttattctgtgtagcttcaaagggcaaaaataagaacaaagaggaactttacaggtgacaaatgtttgcttcaatataaggaagaattgtctaataagagttgttctaaagaggaatagactcaagttagtaagatttcctgttcctgtgaatgcccaacagttaaaataaccacctatcccacgtgctgtgaaagggaatcttacattggatttggtctatatgtctaccaagattccttctaaatataggtttagtctcaatagtaataagactctctaacttcatttgtctttttcttcataagtggtttttcatgctctttgaaatacagtggagttcctttgaggtttttgtcaaggaatttcaacgcatatctcttcccctgttgtactgaaggcttttgagattaattcctcatagaacatctaaatggattggagagttggcaagggaaatgaagctcatcccagcaccttccttagtcactcacgcttagcactctgtcaagatctctgcctcatctgctagcataacatgtggattgcttgttggagcttatttccccgccccccatggtaaattctcatttcctgtgtacatgcacctggacttttttgttttttttaccaagagttgggaaaaatcccttctatgctatctatattctgcaaacaaattattattattattattattgagacagagtattattattattattattattattattactgagacaaagtttcgctcttgtcgcccaggctggagtgcaatggcgtgatctcggctcattgcaacctctgcctcccaaatctcctgcctcagcctcctgagtagctgggattacaggcgcctgccaccatgcaccactaatttatgtatttttagtagagatggggtttcaccatgttggccaggctggtctcgaatgtctgacctcaggtgataagcctgcctcagtctcccaaagctctgggattacaggcgtgagccaccatgctggacccacaaattattattaatttttaaaaacctaacatcttaatttcatcaaatttgttttccctctactgtttttaggaaactgattatgggtagcatttaggggtttggggataataatactatatatttttagacgtaatgagtgttttactaggtttaaataacttctaaagaaaatacaagtgggcaaattagctatgtaataacctacatagaaaacagttgggcaaattacctgtggatatgcagattctacttttgcaaccctggacctggactttttattttttttttttgtggtcacaaataatctttgttatcaataatgtgaaaatattaaaaatgaattcattttaccagtacatagtattactcttagaacataaattagatatcacgtggtatcaagagctgtgctttcttttgagtctagggcctgctttttgactttacagcaaaaagataagaaatgtactcatgacatgtcagacaagacaatgtgaggcactttgtggggagaccattagatgatcccccttgcctgctcttgcagacatagtactagttattccttatcaaaagtttgcatttcattcatattaaatattatctggacagtttcattttttctatttggctcttcccttactgtgccttcctgcattattggcagggttcataatccttgagaacattgtttgatttaaaatattttttatttgaaatgagactgatttctattcaaatccagtggctgggagtaagagtttatttccctagaaacttatgtttctgataaatgggatccatgaaggcaaggactatatataattttttgtgtttccaacacctagcacaaagcttggaatataatagggttcagccaccttaaatgcttgccaggagggcaaacgtatactcatgaaataaaggaaaatgagtatgtattcaataaatgtttgctgaaagaatactgaccctgagactcgaaggctacttaacccttacttatcatcaaatactcataataaagccagcaagcatgcttttatttcctgaaggacttaaataattttgctttccttttactcctgcctccagagtcaagtaataaaacctgtcagcatttaggcacttaatatgctgctgaatttgaactacaatgtacctcattcacattgaaaaacatttttgtgccccaaagcatagtagcatagatgctgtccatagtcacggtgattgattgctttgttcctgcaagtcaaacagatccatgagcctgagccttgcccatttcaatggtcagtaggaaaagaaagcatttgatagagtgcacaaccagtcttcatgcagtaggtctttgttcttccagcactaaccgctgaccgttactttgcatttattttgtcaccacagtaagatggaggtctgagatagtaaggtcaaaatttgtgagataaagtcatgatttcagaggtgatatatatttcaccataagtttagtggtgggaaaacagaatgagctgaagttttttcttaaaagccttgggaatattaaattggtttaagtaggaagcactaccatccagcctgcttatagaaatgctcccagttcgagtggtaactttaactcttctaaaaatgaggattatatgttaattccagcatatctagaccttagtcagggaggtccaatcttttggcttccctgggccacataggaagaagaattgtcttgggtcacacataaaatacagtaacaacagctgatgagctttaaaaacatggccaaaaaatagcattttcttttttgtttttttttttttttttttttttgagacggagtctcagtctgtcacccaggctagagtgcagtggcacgacatcggctcactgcaacctccgcctcccgggttcaagtgattctcctgcctcaacctcccgagtagctgggactacaggcatgtgccaccacgcctgactaatttttgtatttttagtagagatgggatttcattatgttggccagctggtcttgaacttctgagctcaggtgatccacccgccttagcctcccagagtgctaggataacaggcatgagccgccgcgcctggccaaaatagcataatgttttaagaaagtttacgaatttgtcttgggccacattcaaaaccatcatgggccaagggttggacaagctagccttaggtcatgtccagaatgcaatttaacaggaatttcaagcaaaactaacaaaaaattaaatccacaaaaaaatatcatttggtaaatgcactgtctcacacactttactactaagtcccattcaaaccatgacgaccctttacataaaattagggcattctcaccaagtttctaaagatgatttctaaacattaccaaggtctaagtgctaattccccacaaaccatttcttatcttgtttaaatgagactggctttagatatcatgactcatatttatgtgtttaaggaattaaacgtgaaggagatgtataaggcaaccacaaatgtagaaaacaaatgtatgtattagtaatattctcccatgtattaactagaacaagaatgtgagatttttacatttcttctagtgtgccttagcaaatctgctggaaagagtctagttgttttgagaattgaaaaaaaaatgtgtctctcaatttgtcaattctaagcctgtaaaggcagaaactatccacagtaatgagtttggtagtgcctggagagaggcaaatgatcattggatgtaacaaaagctacaagagaatagactaaaaaaagaatttcaatatgaaaaagtaaaatctagagagatgacaaatcagcattgggtaccaagcctcaaaatacttgaactagaagccatctcttaaagttaaaagtaagaagctccaggaaaaataaagattgcatagtaaaaagggatagatggcaggattaattcaactcaacaaatatttatcaaatgtctactctggtcaggtgctgtgttagcagccagcttccctaaagggaggaaaggctagacacgaggacattgaggattgtttatttaaagtcactcataggcatgccataatggatttattaaggggaaattggggtttctgtgaatctttacaggacatagccatggagacaatcactatgttaagtaagttgctgttttcccaattgggcttcagtttcctgagacaaaaaagtgaggaagttggattaattgtttcttcaagtcctttccagctctaaagttgtgggttattttacaaaatatccattggtgccacctttcagtgactcttcctatgtttataagaaccaagaaatttaaattttgaagattggaaaaatcacctggtccatctttttccttttcacatctctctcttttttttttttttttttatcatttccccagacaacagaaacagacaaccttccaaatcctctatattgcagttgccttccacacacagatttaaaaagaggatcaaagagggtggtgaagatcaggtggaatgcttctttggaagttccactggcatcatctatcagaacaatggtgtgagcatgaagaggcacagacaggtctccaaaatagatgttaggatttgggtgctacctgacacagaagtaggtctaaccctccaagtactggggatgataggataatcaatgaggtatatatatatttgtcattttgtataaaatattgtgaaaattgaaggaggacactcagtaaacatcctgggactatttgtaagttatggcaaaaccagatgagagaaaagggacagtcccctctgtatcctcgttgtctcttagtaacatcaaattgtagttaaaaaaattttaaactatgtacaagctacaaaatagcatctctttcatggtatgtttgagtgtgtaattttagtttcttttctggttgtatttgtggtagtcagatgtgttggattgattccaactggacagagtaaggaattccagcatcctcttcctgcttgctcgtgttaccccacagatcaaaccctcaattctagttggggatgctgtctagccccacaccatgactgaagccttaagcactgttgcgcctccatgtgctttggatcagcaaccccagtggtattctaccagagcattgtgggaaagcagatgtatagtcaggtcccaacagcaaattgttgggtgtgagagttctaaagtataggggtgagggaagagaaggatatgaactcctctgaccttaagccagcattcatttaacttttatgtctacttaacaagagaacctggagaaaactaccgtattcaagagattaatcaaaatcagtgttttagccaggcgatgacagagaagcaccattcctcaccctccattcttgtaatgtctgtaataaatttcagtgcgtcaggatggatgaacccaagatccagtgaatgattcagctgttccaagccttacattttccatcattcatcatccattctcattcagtgtaacctcttgcactattgtggttaattttatgtaaaaccagtttatgtttttttttttttaatatgtgcctatgtaataaagtctacacactggctatctctgtagaggtgaggttttgtttttagttgttctactgattatatccttttctgagctatgaaaatgaattattaataaaaaatttttgaacaaaataaaaaaaaaaaaaaaa

SEQ ID NO: 16 - protein, 905 aa, homo sapiens
MTTLDHVIATHQSEWVSFNEEPPFPAHSQGGTEEHLPGLSSSPDQSESSSGENHVVDGGSQDHSHSEQDDSSEKMGLISEAASPPGSPEQPPPDLASAISNWVQFEDDTPWASTSPPHQETAETALPLTMPCWTCPSFDSLGRCPLTSESSWTTHSEDTSSPSFGCSYTDLQLINAEEQTSGQASGADSTDNSSSLQEDEEVEMEAISWQASSPAMNGHPAPPVTSARFPSWVTFDDNEVSCPLPPVTSPLKPNTPPSASVIPDVPYNSMGSFKKRDRPKSTLMNFSKVQKLDISSLNRTPSVTEASPWRATNPFLNETLQDVQPSPINPFSAFFEEQERRSQNSSISSTTGKSQRDSLIVIYQDAISFDDSSKTQSHSDAVEKLKQLQIDDPDHFGSATLPDDDPVAWIELDAHPPGSARSQPRDGWPMMLRIPEKKNIMSSRHWGPIFVKLTDTGYLQLYYEQGLEKPFREFKLEICHEISEPRLQNYDENGRIHSLRIDRVTYKEKKKYQPKPAVAHTAEREQVIKLGTTNYDDFLSFIHAVQDRLMDLPVLSMDLSTVGLNYLEEEITVDVRDEFSGIVSKGDNQILQHHVLTRIHILSFLSGLAECRLGLNDILVKGNEIVLRQDIMPTTTTKWIKLHECRFHGCVDEDVFHNSRVILFNPLDACRFELMRFRTVFAEKTLPFTLRTATSVNGAEVEVQSWLRMSTGFSANRDPLTQVPCENVMIRYPVPSEWVKNFRRESVLGEKSLKAKVNRGASFGSTSVSGSEPVMRVTLGTAKYEHAFNSIVWRINRLPDKNSASGHPHCFFCHLELGSDREVPSRFANHVNVEFSMPTTSASKASVRSISVEDKTDVRKWVNYSAHYSYQVALGSIWLMLPTPFVHPTTLPLLFLLAMLTMFAW

SEQ ID NO: 17 - DNA, 3070 bp, homo sapiens
ggcgccgtcttgatactttcagaaagaatgcattccctgtaaaaaaaaaaaaaaaatactgagagagggagagagagagagaagaagagagagagacggagggagagcgagacagagcgagcaacgcaatctgaccgagcaggtcgtacgccgccgcctcctcctcctctctgctcttcgctacccaggtgacccgaggagggactccgcctccgagcggctgaggaccccggtgcagaggagcctggctcgcagaattgcagagtcgtcgcccctttttacaacctggtcccgttttattctgccgtacccagtttttggatttttgtcttccccttcttctctttgctaaacgacccctccaagataatttttaaaaaaccttctcctttgctcacctttgcttcccagccttcccatccccccaccgaaagcaaatcattcaacgacccccgaccctccgacggcaggagccccccgacctcccaggcggaccgccctccctccccgcgcgcgggttccgggcccggcgagagggcgcgagcacagccgaggccatggaggtgacggcggaccagccgcgctgggtgagccaccaccaccccgccgtgctcaacgggcagcacccggacacgcaccacccgggcctcagccactcctacatggacgcggcgcagtacccgctgccggaggaggtggatgtgctttttaacatcgacggtcaaggcaaccacgtcccgccctactacggaaactcggtcagggccacggtgcagaggtaccctccgacccaccacgggagccaggtgtgccgcccgcctctgcttcatggatccctaccctggctggacggcggcaaagccctgggcagccaccacaccgcctccccctggaatctcagccccttctccaagacgtccatccaccacggctccccggggcccctctccgtctaccccccggcctcgtcctcctccttgtcggggggccacgccagcccgcacctcttcaccttcccgcccaccccgccgaaggacgtctccccggacccatcgctgtccaccccaggctcggccggctcggcccggcaggacgagaaagagtgcctcaagtaccaggtgcccctgcccgacagcatgaagctggagtcgtcccactcccgtggcagcatgaccgccctgggtggagcctcctcgtcgacccaccaccccatcaccacctacccgccctacgtgcccgagtacagctccggactcttcccccccagcagcctgctgggcggctcccccaccggcttcggatgcaagtccaggcccaaggcccggtccagcacagaaggcagggagtgtgtgaactgtggggcaacctcgaccccactgtggcggcgagatggcacgggacactacctgtgcaacgcctgcgggctctatcacaaaatgaacggacagaaccggcccctcattaagcccaagcgaaggctgtctgcagccaggagagcagggacgtcctgtgcgaactgtcagaccaccacaaccacactctggaggaggaatgccaatggggaccctgtctgcaatgcctgtgggctctactacaagcttcacaatattaacagacccctgactatgaagaaggaaggcatccagaccagaaaccgaaaaatgtctagcaaatccaaaaagtgcaaaaaagtgcatgactcactggaggacttccccaagaacagctcgtttaacccggccgccctctccagacacatgtcctccctgagccacatctcgcccttcagccactccagccacatgctgaccacgcccacgccgatgcacccgccatccagcctgtcctttggaccacaccacccctccagcatggtcaccgccatgggttagagccctgctcgatgctcacagggcccccagcgagagtccctgcagtccctttcgacttgcatttttgcaggagcagtatcatgaagcctaaacgcgatggatatatgtttttgaaggcagaaagcaaaattatgtttgccactttgcaaaggagctcactgtggtgtctgtgttccaaccactgaatctggaccccatctgtgaataagccattctgactcatatcccctatttaacagggtctctagtgctgtgaaaaaaaaaatgctgaacattgcatataacttatattgtaagaaatactgtacaatgactttattgcatctgggtagctgtaaggcatgaaggatgccaagaagtttaaggaatatgggagaaatagtgtggaaattaagaagaaactaggtctgatattcaaatggacaaactgccagttttgtttcctttcactggccacagttgtttgatgcattaaaagaaaataaaaaaaagaaaaaagagaaaagaaaaaaaaagaaaaaagttgtaggcgaatcatttgttcaaagctgttggcctctgcaaaggaaataccagttctgggcaatcagtgttaccgttcaccagttgccgttgagggtttcagagagcctttttctaggcctacatgctttgtgaacaagtccctgtaattgttgtttgtatgtataattcaaagcaccaaaataagaaaagatgtagatttatttcatcatattatacagaccgaactgttgtataaatttatttactgctagtcttaagaactgctttctttcgtttgtttgtttcaatattttccttctctctcaatttttggttgaataaactagattacattcagttggcctaaggtggttgtgctcggagggtttcttgtttcttttccattttgtttttggatgatatttattaaatagcttctaagagtccggcggcatctgtcttgtccctattcctgcagcctgtgctgagggtagcagtgtatgagctaccagcgtgcatgtcagcgaccctggcccgacaggccacgtcctgcaatcggcccggctgcctcttcgccctgtcgtgttctgtgttagtgatcactgcctttaatacagtctgttggaataatattataagcataataataaagtgaaaatattttaaaactacaa

SEQ ID NO: 18 - protein, 444 aa, homo sapiens
MEVTADQPRWVSHHHPAVLNGQHPDTHHPGLSHSYMDAAQYPLPEEVDVLFNIDGQGNHVPPYYGNSVRATVQRYPPTHHGSQVCRPPLLHGSLPWLDGGKALGSHHTASPWNLSPFSKTSIHHGSPGPLSVYPPASSSSLSGGHASPHLFTFPPTPPKDVSPDPSLSTPGSAGSARQDEKECLKYQVPLPDSMKLESSHSRGSMTALGGASSSTHHPITTYPPYVPEYSSGLFPPSSLLGGSPTGFGCKSRPKARSSTEGRECVNCGATSTPLWRRDGTGHYLCNACGLYHKMNGQNRPLIKPKRRLSAARRAGTSCANCQTTTTTLWRRNANGDPVCNACGLYYKLHNINRPLTMKKEGIQTRNRKMSSKSKKCKKVHDSLEDFPKNSSFNPAALSRHMSSLSHISPFSHSSHMLTTPTPMHPPSSLSFGPHHPSSMVTAMG

SEQ ID NO: 19 - DNA, 2575 bp, homo sapiens
gggacacagagggaggaagaagcggcggcggcggcggcggcggcggcggctcctctttgcagagggggaaactcttgggctgagagcaggaataatgcggtaggcaaggcgggctgctggctcccccggctccggcagcagcggcggcagcccgagcagcggcagcagcagcggcagcaccccaggcgctgacagccccgccggccggctccgttgctgaccgccgactgtcaatggagctggaaaacatcgtggccaacacggtcttgctgaaagccagggaagggggcggaggaaagcgcaaagggaaaagcaagaagtggaaagaaatcctgaagttccctcacattagccagtgtgaagacctccgaaggaccatagacagagattactgcagtttatgtgacaagcagccaatcgggaggctgcttttccggcagttttgtgaaaccaggcctgggctggagtgttacattcagttcctggactccgtggcagaatatgaagttactccagatgaaaaactgggagagaaagggaaggaaattatgaccaagtacctcaccccaaagtcccctgttttcatagcccaagttggccaagacctggtctcccagacggaggagaagctcctacagaagccgtgcaaagaactcttttctgcctgtgcacagtctgtccacgagtacctgaggggagaaccattccacgaatatctggacagcatgttttttgaccgctttctccagtggaagtggttggaaaggcaaccggtgaccaaaaacactttcaggcagtatcgagtgctaggaaaagggggcttcggggaggtctgtgcctgccaggttcgggccacgggtaaaatgtatgcctgcaagcgcttggagaagaagaggatcaaaaagaggaaaggggagtccatggccctcaatgagaagcagatcctcgagaaggtcaacagtcagtttgtggtcaacctggcctatgcctacgagaccaaggatgcactgtgcttggtcctgaccatcatgaatgggggtgacctgaagttccacatctacaacatgggcaaccctggcttcgaggaggagcgggccttgttttatgcggcagagatcctctgcggcttagaagacctccaccgtgagaacaccgtctaccgagatctgaaacctgaaaacatcctgttagatgattatggccacattaggatctcagacctgggcttggctgtgaagatccccgagggagacctgatccgcggccgggtgggcactgttggctacatggctccagaggtcctgaacaaccagaggtacggcctgagccccgactactggggccttggctgcctcatctatgagatgatcgagggccagtcgccgttccgcggccgcaaggagaaggtgaagcgggaggaggtggaccgccgggtcctggagacggaggaggtgtactcccacaagttctccgaggaggccaagtccatctgcaagatgctgctcacgaaagatgcgaagcagaggctgggctgccaggaggagggggctgcagaggtcaagagacaccccttcttcaggaacatgaacttcaagcgcttagaagccgggatgttggaccctcccttcgttccagacccccgcgctgtgtactgtaaggacgtgctggacatcgagcagttctccactgtgaagggcgtcaatctggaccacacagacgacgacttctactccaagttctccacgggctctgtgtccatcccatggcaaaacgagatgatagaaacagaatgctttaaggagctgaacgtgtttggacctaatggtaccctcccgccagatctgaacagaaaccaccctccggaaccgcccaagaaagggctgctccagagactcttcaagcggcagcatcagaacaattccaagagttcgcccagctccaagaccagttttaaccaccacataaactcaaaccatgtcagctcgaactccaccggaagcagctagtttcggctctggcctccaagtccacagtggaaccagcccagacccttctccttagaagtggaagtagtggagcccctgctctggtggggctgccaggggagaccccgggagccggggaaggaggccgtccatcccgtcgacgtagaacctcgaggtttctcaaagaaatttccactcaggtctgttttccgaggcggccccggccggggtggattggatttgtctttggtgaacattgcaatagaaatccaattggatacgacaacttgcacgtattttaatagcgtcataactagaactgaattttgtctttatgatttttaaagaaaagttttgtaaatttctctactgtctcagtttacattttgtatatttgtatttaaatgaaagtgagactttgagggtgtatattttctgtgcagccactgttaagccatgtgttccaaggcattttagcggggagggggttatcaaaaaaaaaaaaatgtgactcaagacttccagagcctcaaatgagaaaatgtctttattaaatgtagaaagtgatccataaaaaaaaaaaaaaaaaa

SEQ ID NO: 20 - protein, 590 aa, homo sapiens
MELENIVANTVLLKAREGGGGKRKGKSKKWKEILKFPHISQCEDLRRTIDRDYCSLCDKQPIGRLLFRQFCETRPGLECYIQFLDSVAEYEVTPDEKLGEKGKEIMTKYLTPKSPVFIAQVGQDLVSQTEEKLLQKPCKELFSACAQSVHEYLRGEPFHEYLDSMFFDRFLQWKWLERQPVTKNTFRQYRVLGKGGFGEVCACQVRATGKMYACKRLEKKRIKKRKGESMALNEKQILEKVNSQFVVNLAYAYETKDALCLVLTIMNGGDLKFHIYNMGNPGFEEERALFYAAEILCGLEDLHRENTVYRDLKPENILLDDYGHIRISDLGLAVKIPEGDLIRGRVGTVGYMAPEVLNNQRYGLSPDYWGLGCLIYEMIEGQSPFRGRKEKVKREEVDRRVLETEEVYSHKFSEEAKSICKMLLTKDAKQRLGCQEEGAAEVKRHPFFRNMNFKRLEAGMLDPPFVPDPRAVYCKDVLDIEQFSTVKGVNLDHTDDDFYSKFSTGSVSIPWQNEMIETECFKELNVFGPNGTLPPDLNRNHPPEPPKKGLLQRLFKRQHQNNSKSSPSSKTSFNHHINSNHVSSNSTGSS

SEQ ID NO: 21 - DNA, 1849 bp, homo sapiens
gggttatatgatctctttggctttagggaattactccataccagctctgagatttccagctcagcgatgcccccaggtccctgggagagctgcttctgggtggggggcctcattttgtggctcagcgttggaagttcaggggatgcacctcctaccccacagccaaagtgcgctgacttccagagcgccaacctttttgaaggcaccgatctcaaagtccagtttctcctctttgtcccttcgaatcctagctgtgggcagctagtagaaggaagcagtgacctccaaaactctgggttcaatgccactctgggaaccaaactaattatccatggattcagggttttaggaacaaagccttcctggattgacacatttattagaacccttctgcgtgcaacgaatgctaatgtgattgccgtggactggatttatgggtctacaggagtctacttctcagctgtgaaaaatgtgattaagttgagcctcgagatctcccttttcctcaataaactcctggtgctgggtgtgtcggaatcctcaatccacatcattggtgttagcctgggggcccacgttgggggcatggtgggacagctcttcggaggccagctgggacagatcacaggcctggaccccgctggacctgagtacaccagggccagtgtggaagagcgcttggatgctggagatgccctcttcgtggaagccatccacacagacaccgacaatttgggtattcggattcccgttggacatgtggactacttcgtcaacggaggccaagaccaacctggctgccccaccttcttttacgcaggttatagttatctgatctgtgatcacatgagggctgtgcacctctacatcagcgccctggagaattcctgtccactgatggcctttccctgtgccagctacaaggccttccttgctggacgctgtctggattgctttaacccttttctgctttcctgcccaaggataggactggtggaacaaggtggtgtcaagatagagccgctccccaaggaagtgaaagtctacctcctgactacttccagtgctccgtactgcatgcatcacagcctcgtggagtttcacttgaaggaactgagaaacaaggacaccaacatcgaggttaccttccttagcagtaacatcacctcttcatctaagatcaccatacctaagcagcaacgctatgggaaaggaatcatagcccatgccaccccacaatgccagataaaccaagtgaaattcaagtttcagtcttccaaccgagtttggaaaaaagaccggactaccattattgggaagttctgcactgcccttttgcctgtcaatgacagagaaaagatggtctgcttacctgaaccagtgaacttacaagcaagtgtgactgtttcctgtgacctgaagatagcctgtgtgtagtttaacctgggcaggacacatctccctgcattttttttttttttttgagagagaggtgtgatgagggatgtgtgtgtgcagcttattgtagaccattactactaaggagaaaagcaaagctctttcttattttcctcataatcagctaccctggaggggagggagaactcattttacagaacttggtttcctttgccgatcttatgtacatacccattttagctttcccatgcatacttaactgcacttgctttatctccttgggcattcgtacttaggattcaatagaaacatgtacagggtaaacaattttttaaaaataaaacttcatggagtatctgaaaaaaaaaaaaaaaaaaaaaaaaaaaaaaaaaaaaaaaaaaaaaaaaaaaaaaaaaaaaaaaaaaaaaaa

SEQ ID NO: 22 - protein, 456 aa, homo sapiens
MPPGPWESCFWVGGLILWLSVGSSGDAPPTPQPKCADFQSANLFEGTDLKVQFLLFVPSNPSCGQLVEGSSDLQNSGFNATLGTKLIIHGFRVLGTKPSWIDTFIRTLLRATNANVIAVDWIYGSTGVYFSAVKNVIKLSLEISLFLNKLLVLGVSESSIHIIGVSLGAHVGGMVGQLFGGQLGQITGLDPAGPEYTRASVEERLDAGDALFVEAIHTDTDNLGIRIPVGHVDYFVNGGQDQPGCPTFFYAGYSYLICDHMRAVHLYISALENSCPLMAFPCASYKAFLAGRCLDCFNPFLLSCPRIGLVEQGGVKIEPLPKEVKVYLLTTSSAPYCMHHSLVEFHLKELRNKDTNIEVTFLSSNITSSSKITIPKQQRYGKGIIAHATPQCQINQVKFKFQSSNRVWKKDRTTIIGKFCTALLPVNDREKMVCLPEPVNLQASVTVSCDLKIACV

SEQ ID NO: 23 - DNA, 8931 bp, homo sapiens
cttcccgcactgcttggggagagctggtgagcaagagtctggcccgagttagctagagctgttgccatgacaagcattttcttaagaaagctctgctgttgagatcgtccaaagctgggggctgggagggggggcacgaacttcgtggggcaccatccctccgaagagagcaagatcagagacacccgcccagctctcctgcaccctttttctttcaggaacctgagaggtccttcccattggaggggcagggggaggagacccagcccactccccggccttagccagaaaggcaagagagcaaagccagcgtctctagcttggttgccacactggggagactggtgggtggtcaccccaccctaccctcatccatggaaacccggagggagagtcccgcctgaagaaacctggatctttgctagaaagagagagatccagttgtcatcggtatccaggaagctctcctcttcctcctcctgacgtctactactacagttgctggttgttgctaaggttgctgccatggtaacatgcacatcctgtttacaccttcatctgggcaagttggtctaagctaggaacctacctaccctggacaactactatcatcaccacctggggacaccaatcatcgtgacacggagtccaccttccactcagttcccccatcctcttcctcctctcgctgccagacttcatacggaagaaaggatctagacttcggacggctactcgggagcttattgcacaagatatattcaatctattccctcactgggcccccagagaagcaagaagtaggaagaagttgagacagggaggcaggagacactggtcagttgaagggaaacgctacatcttctctggttgaggggcttggtaacagcaggcaaaatgacgaacccatcagaccgtgtcttgcctgccaactcgatggccgagagccgtgaaggggactttggctgcacagtaatggaactgaggaagctcatggagctgcgttcaagggatgcactgacccagattaatgtccactatggaggtgtacagaatctctgcagtagactgaaaacctcccctgtggaaggtctgtctgggaaccctgcagatctggagaaacgtaggcaggtgtttggacacaacgtgatcccccccaaaaagcccaagactttcttagaattagtgtgggaagctcttcaagatgtcacgcttatcatcctggagattgcagccatcatctccctggtcctgtccttttatcgccctgctggtgaagaaaatgaactgtgtggtcaagtcgcaactaccccagaagatgaaaatgaggcacaagctggctggattgagggggcagccatccttttctcagtgatcatcgtggtgttagtgactgcctttaatgattggagcaaagagaagcaattccgggggctgcagtgccgcattgaacaggagcaaaagttctccatcatccgaaacggtcaactcatccagctccctgtggctgagattgtggttggtgatattgcccaagtcaaatacggtgatctgctgcctgcagatggaatcctgatccaagggaatgatctgaagattgatgagagctctctgacaggggaatctgaccatgtcaagaagtccctggacaaagaccccatgttgctctcagggacccatgtcatggaaggttctggccggatggtggtgacagctgttggtgtcaactctcagactggaatcatccttactctcttgggggtcaatgaggatgacgaaggggagaaaaagaagaaaggtaaaaaacaaggagtccctgaaaatcgcaacaaagcaaagacccaagacggagtggccctggaaatccagccactcaacagccaggagggaatcgacaatgaggaaaaggacaagaaggcagtcaaggtgcctaaaaaggagaagtcagtgctgcagggcaagctgactcgcctggctgttcagattgggaaagccggtctgctcatgtctgctctcacggttttcatcctgattctatactttgtgattgacaactttgtgataaatcgcagaccatggctccctgagtgtactcccatctacatccagtactttgtcaagttcttcatcatcggcatcactgtactggtggtggctgtgccagaggggctgcctctggctgtcaccatctcactggcctactctgtgaagaaaatgatgaaagacaataacctagtacggcacttggatgcttgtgagaccatgggcaacgccaccgccatctgctctgataagacaggcacgttgaccatgaaccgcatgactgtggtacaagcttatattgggggcatccattaccgtcaaatcccaagccctgatgtcttcctgcccaaagtcctggacctcattgtcaatggcatttctatcaacagtgcttatacctccaagattctgcctccagagaaggagggaggcctgcctcggcaggtgggcaacaagaccgagtgtgctctgctaggctttgtcacagatctgaagcaggattatcaggctgtgcgtaatgaagtgcccgaggagaagctctacaaggtgtacacctttaactcagtgcgcaagtcaatgagcaccgtcatcaggaatcccaacggtggcttccgtatgtacagcaagggcgcctctgagatcatcttgcgcaagtgtaatcgaatcctggaccggaaaggggaagcagtgccattcaagaataaagacagagatgatatggtacgcactgtcatcgagcccatggcctgtgatggactccggactatctgcatagcttaccgggacttcgatgacacagagccctcttgggacaatgagaatgagatcctcaccgaactgacctgtatcgcggtggtgggcattgaggaccctgtgcgcccagaggtgccagatgctattgccaaatgcaaacaagctggcattactgtcagaatggtgacaggtgacaacatcaacacagcccgggccattgccaccaaatgtggcattctgacacctggggatgacttcctgtgcttagaaggcaaagaattcaaccggctcatccgcaacgagaaaggcgaggtagagcaagaaaagctggacaagatctggcctaagcttcgggtcctggcgcgatcttctcccactgacaagcacaccctggtgaaaggcataattgacagcactgttggggaacaccggcaggtcgtggctgtcactggtgatggcacaaatgacgggcctgctctgaagaaagcggatgttggttttgccatgggcatcgcaggcacagatgtagcaaaggaggcttcagacatcatcctaacagatgacaacttcaccagcattgtgaaggcagtgatgtggggacgaaatgtctatgacagcatctccaagttcctgcagttccagctcactgtcaatgtggtggccgtgattgtagccttcactggagcctgtatcactcaggattccccattgaaagctgtgcagatgttgtgggttaatctgatcatggacacttttgcttcattggccctggccacagagccccctacggaatctctgttgaagcggcgcccctatggccgaaataagcctctgatctcacgcactatgatgaagaacatcttgggccatgcattctatcagctcattgtcatctttatccttgtctttgcgggtgagaaattctttgatattgatagtgggaggaaggcacctctacattcaccacccagccagcactataccattgtttttaacaccttcgtgctgatgcagctcttcaatgaaatcaactcccgaaagatccatggagagaagaacgtcttttcaggcatctaccgcaacattatcttctgctctgtagtcttgggcacattcatctgccagattttcatcgtggaatttgggggtaaacccttcagttgtacaagcctcagcctgtctcagtggctgtggtgtctcttcattgggattggagaacttctgtggggccagttcatctccgcaatacctacccgatccctgaagttcctgaaggaggctgggcatggcaccaccaaagaggagatcaccaaggatgccgagggactggatgagattgaccatgctgagatggagctgcgccgaggccagatcctctggttccggggcctgaaccgtatccagactcagatcgacgtaattaacacattccagacgggagcctcttttaagggagtcctaaggcgacagaacatgggtcaacaccttgatgtaaaacttgttcctagttcatcctatgtagcagttgcaccagtcaaatcttcccccaccacttctgttcctgctgtttcatctcctcctatgggcaatcaaagtggtcaaagcgttccatagttccctccacgaaagcattcagaaaccctacaaccaaaagtccatccacagcttcatgacccaccctgaattcgccatagaggaggagttgccacgaacaccactcctggatgaggaagaggaggaaaatcctgacaaggcttctaagtttgggactagggtgctcctgttggatggtgaggtcactccatatgccaatacaaacaacaatgcggtggattgcaaccaagtgcagctcccccagtcggacagctctctacagagcctagagacatcagtttgaattttctttctctgactctcatccctattttacctatttccattttcgtctatcccatctatgaggtgatgatgggacttttcattgtcacgtcagctgctgtgttaacagcagtgtgtgtgaagtgaacctctacctgaccatgaagaggcaagagcacagacttacaaggatttcaacttaagcttgacttggggtttgtagcgggacccagtcaaaccccattcaggtcatggtagaatctactccttggtagtcacttgtcatttttaaagaaatgatgacaatcctcttggcatcaccccaccccacattctccccgatgttcctctcctgaattctggattttgtcctacaagtctgtgccatttataagctaagttgagggttcagagggagacaaatatccccaagtgaaatatgttgcggtagagatggaatgtataaaatccgccagtagtgtgattgtttttcaatttttcccactttgaaaacttacacctaaaggcctgtaggcctctaactctttctgccctttcattcaaacctctccaaagttctttgtcttttgtcttcccttcctttccttttttttttttttttttatgatgattaagaaaatggaaaggatatggatgaattgtgtaaacttagatccttctcccttttggcccaaaagaacccttgatttagttccagaatccaaccagtttctttgttaaaagggtccttttgaagcaattaagtgctggtaagaatatttctctgttgttgccaggttaccttctgcttttaaattgccatcttgtaaagtgtatgtggttcttaagtgccagggagatcagccttgcccatgaaggttgcatatgtgtggtatacagtttttacctgaaagcctgagctttctcttattcctaaagtggtggcaaaagaatgaactgggtatgaccctgcccccttactgggcttggatattgaggaccagacgctgccaaatctaggacaagacagaccatcaaagcagacttttgtgggctcctctttggggtgaccactgctttcaaagccatctgccaaggctctccagggcaggacctgactggtggggaatgagtgttcagaagccttgggagaggccaaagagccattctagcatgatctgagaaaaccttcctgcagaggccagaaaccttgagcttaggtgcctggggaccagcttcgacattctctccagtttctgattctaatttttgccacgtgtcacaacttttccagtctctgagaaggtcccagcctttctcaaatattctgattttgaaaatatgtatccaaagtgggaggcccctgtgacattttgccaacttaaacgagaaaaagaccccccgcacccggcacactcccccttcctccagccccgcttcagccacatgctccagctgctgcccagtaaagccctgtgcctttttttcccctgaatactgcccaaagcatccccttcccatctgcctctcaggagttggggactttgctaggagattttttaagtgttccttactgggacaacgtggagccacgtttgcaggagctccatttgtatccctgctggtgttgacttctgtgtaggggccagttcatgtccctgactctcacctcccattagataaatgaagcccacccccctttctagagtgatgagagtcaagaagaggggatgtatgaacggccaaattcccatgtgagaggaagatgacctgatccacctagccttttcttctggatctgtcctccctcacccctttcacctgagctgtccacagtaggaaacataaagaaacaatgtcccctacatatccccatgactacataatccatcatcgtaggaaataggaaagcaaatttgattttggttttgtaaaacgtacatgcttcaataattcttttttgtgtcttaaatactcataggggaaaaaaacagctcacccaaggtgttaggtttcacatatatattcatcaactattttagaagatttaattctatcaaatcttgtattacctcagatcattttaaatagcaagccaataacgagctttgaaggctattttaccattcctgttcacaaaaggttctcatggtgcctgacaggttacccttgagggcttgtgtctactttttaaaagtcaatggttttttttcttgtgttctagtttccataataggagagaaaatatagaaatatatgcaaaaattatagttttctttagatcagaaactgatatttttgggtcagccatatgtattttgtttaaaggatttaaaataaagtgccgtcatgtagccctgtggaagggagcacataaccagctgtttggcatgacaggtgacttagtatatttgtaattggttttaaaaccaatacaccatactttctttctgcaaacagccatctttatacttagggaagaaaaattgttgggttctagacttttttaatataaattttgttgatatggaattaggtaagtttaagtgtctatgtgcatatgttttttatataagttttttctattcagtttcactgatccaactggcagtgggtaaatatggcataagttaataacacttttccccaaaatggtgctttggatttgaaaagggtctgatggggagaaggagaacgtatcatcctagcttcctctcttaataaacctagaaaaacgggtagtaaactgtggatagtcaggaaaacacccagcaagggacacagctgtcaggaaatgaatcttccccccaacccccaccatgcagatggatagacagaatctttcctgactagtcattaggatcaggggcctctgttggatttgtgtttcttgaagaatagctggcagagtggtataaaagacacgaatatctcctggtctataaggatactctgatttggggtttgcatttttcatggtttttatttcctgttccccctggagttttccattagtgagtttttgtgcaaggatcttatttgtgatgccttccctcccctagaaagattttgtgcaatatattaaatggggacagaattctaaatggataaaacaatggctggttctagccctgagtgacagtcttaaggctagatccttcccatagtatcatctgtcctctggaatgactctcctgtccctaaaggggttaagagagagatcacctagaaatccctctggacacttgtgggttctttagggtttgagtttcttcttccccttgagcttcagagaggagagttggcatggttaaatctgaatggttacctcactgctgaaaacccagaggggcgtggcacactcgcttgtgtggaaaagcctctaaatgcatcccttcctttctttcctgcttcctttgccttacaattgaagcagcccgtggtaccatcacagtatgcagagacttcctcacctttcatatctagggaccacccccgatgcattggtgagggtgggcacttataaatgcctgctattgttaagccattccagcctcttcctctgaatagaccagacgccctttcacttagttcagtgccagtccttttgccttcccaaccctgctgttaggcctgctgttccctttgctcttgattaggagagatggaaggagatgagctcccataactgaattggcctttggttcatgttttctccccatatgtatatatgccatatgtgaatatgccatatatatgtgccaacaaatctatctacgttgttcttttcaaattagcacgcagataggaattttgagtttcttcttcttttagtaactagtataacaagcactggtatttttgtacaaaaaagaaaaacaaaagattgactattgtggtctgcatgacataaacaaacaaatggtgatatcaaagcaacgtataccccagtccagtgtgtgttgccataatttgcaattcagcttaacagtgcacccaatctatatttgcattttgatattatttaagctctatgtacaaggttttgcatgtatttatatggttcttagggaaaaaaaatgctataaactgcaaatctgaaattcaaatgtgttgttccactgagaccagaagaagaagaggagttttaaaagggataatttgttggagccaataaagctttttgctgatgaacagaaaccaatactgctgtgcactgagaataaaaactcatgcccacttgtaaaaaaaaaaaaa

SEQ ID NO: 24 - protein, 1170 aa, homo sapiens
MTNPSDRVLPANSMAESREGDFGCTVMELRKLMELRSRDALTQINVHYGGVQNLCSRLKTSPVEGLSGNPADLEKRRQVFGHNVIPPKKPKTFLELVWEALQDVTLIILEIAAIISLVLSFYRPAGEENELCGQVATTPEDENEAQAGWIEGAAILFSVIIVVLVTAFNDWSKEKQFRGLQCRIEQEQKFSIIRNGQLIQLPVAEIVVGDIAQVKYGDLLPADGILIQGNDLKIDESSLTGESDHVKKSLDKDPMLLSGTHVMEGSGRMVVTAVGVNSQTGIILTLLGVNEDDEGEKKKKGKKQGVPENRNKAKTQDGVALEIQPLNSQEGIDNEEKDKKAVKVPKKEKSVLQGKLTRLAVQIGKAGLLMSALTVFILILYFVIDNFVINRRPWLPECTPIYIQYFVKFFIIGITVLVVAVPEGLPLAVTISLAYSVKKMMKDNNLVRHLDACETMGNATAICSDKTGTLTMNRMTVVQAYIGGIHYRQIPSPDVFLPKVLDLIVNGISINSAYTSKILPPEKEGGLPRQVGNKTECALLGFVTDLKQDYQAVRNEVPEEKLYKVYTFNSVRKSMSTVIRNPNGGFRMYSKGASEIILRKCNRILDRKGEAVPFKNKDRDDMVRTVIEPMACDGLRTICIAYRDFDDTEPSWDNENEILTELTCIAVVGIEDPVRPEVPDAIAKCKQAGITVRMVTGDNINTARAIATKCGILTPGDDFLCLEGKEFNRLIRNEKGEVEQEKLDKIWPKLRVLARSSPTDKHTLVKGIIDSTVGEHRQVVAVTGDGTNDGPALKKADVGFAMGIAGTDVAKEASDIILTDDNFTSIVKAVMWGRNVYDSISKFLQFQLTVNVVAVIVAFTGACITQDSPLKAVQMLWVNLIMDTFASLALATEPPTESLLKRRPYGRNKPLISRTMMKNILGHAFYQLIVIFILVFAGEKFFDIDSGRKAPLHSPPSQHYTIVFNTFVLMQLFNEINSRKIHGEKNVFSGIYRNIIFCSVVLGTFICQIFIVEFGGKPFSCTSLSLSQWLWCLFIGIGELLWGQFISAIPTRSLKFLKEAGHGTTKEEITKDAEGLDEIDHAEMELRRGQILWFRGLNRIQTQIDVINTFQTGASFKGVLRRQNMGQHLDVKLVPSSSYVAVAPVKSSPTTSVPAVSSPPMGNQSGQSVP

SEQ ID NO: 25 - DNA, 3620 bp, homo sapiens
acctcgcagtctccccaggtccgcccagcagccgcgcttcagccagaatactgggatcttcagtggcaggaggagtaatcagaagacggagatgaattttaacactattttggaggagattcttattaaaaggtcacagcagaaaaagaagacatcgcccttaaactacaaagagagactttttgtacttacaaagtccatgctaacctactatgagggtcgagcagagaagaaatacagaaaggggtttattgatgtttcaaaaatcaagtgtgtggaaatagtgaagaatgatgatggtgtcattccctgtcaaaataagtatccatttcaggttgttcatgatgctaacacactttacatttttgcacctagtccacaaagcagggacctgtgggtgaagaagttaaaagaagaaataaagaacaacaataatattatgattaaatatcatcctaaattctggacagatggaagttatcagtgttgtagacaaactgaaaaattagcacccggatgtgaaaaatacaatctttttgagagcagtataagaaaagcactacctccagcaccagaaacaaagaagcgaaggcctcccccaccaattccactagaagaagaagataatagtgaagaaatcgttgtagccatgtatgatttccaagcagcagaaggacatgatctcagattagagagaggccaagagtatctcattttagaaaagaatgatgttcattggtggagagcaagagataaatatgggaatgaaggatatatcccaagtaattacgtaacgggaaagaaatcaaacaacttagatcaatatgaatggtattgcagaaatatgaatagaagcaaggcagagcaactcctccgcagtgaagataaagaaggtggttttatggtaagggattccagtcaaccaggcttgtacacagtctccctttataccaagtttggaggagaaggttcatcgggttttaggcattatcatataaaggaaacaacaacatctccaaagaagtattacctagctgaaaaacatgcttttggctccattcctgagattattgaatatcataagcacaatgcagcaggacttgtcaccaggcttcggtacccagttagtgtgaaagggaagaatgcacccaccactgcaggattcagctatgagaaatgggagattaacccttcagaactgacctttatgagggaattgggaagtggactgtttggagtggtgaggcttggcaaatggcgagcccagtacaaagtcgcaatcaaagctattcgggaaggtgcaatgtgcgaggaggactttatagaagaagctaaagtgatgatgaaactgacacacccgaagttagtgcagctttatggtgtgtgcacccagcagaaaccaatatacattgttactgagttcatggaaaggggctgccttctgaatttcctccgacagagacaaggtcatttcagtagagacgtactgctgagcatgtgtcaggatgtgtgtgaagggatggagtatctggagagaaacagcttcatccacagagatctggctgccagaaattgtctagtaagtgaggcgggagttgtaaaagtatctgattttggaatggccaggtatgttctggatgatcagtacacaagttcttctggtgctaagtttcctgtgaagtggtgtccacctgaagtgtttaattacagccgcttcagcagcaaatcagatgtctggtcatttggtgttttaatgtgggaagtattcacggaaggcagaatgccttttgaaaaatacaccaattatgaagtggtaaccatggttactcgaggccaccgactctaccagccgaagttggcgtccaactatgtgtatgaggtgatgctgagatgttggcaggagaaaccagagggaaggccttctttcgaagatctgctgcgcacaatagatgaactagttgaatgtgaagaaacttttggaagataagtgatgtgtgaccagtggctcccagattcccaagcacaaggaaggatgggcattttgtggcttttaatttattgagcacttggacatgtagatcattttacttatacagtggaaacacataaataatttgcttctagaccagcctctgtctagacttgcttctagacagaatctcccagagtgtggaaatgttgccttagaaatggtgattaaaatcactcatttctattcattcctcaggcacttgagtgacagttgtttaccaggcactgtgtgtagccccagggtttggccattcaggggtgcacacatgggaccatgttagctgatgccagttgaaggccagggtatttgggaaggggaagggtattagagtcatgaccaagcaacccttctttttccctttgacttctacagaaatctgggcctgagacattgtctacaattgggttctagatacatcaggaacccatcttggataaataaatacctatcttttgttttgaaaacatctcagttttcaagactgctcttagtattacatgaacaatatttgtatgctgtatatattgtaaatatatataatatataaagttatatatttatgagaaacacgaattgtcttttaattgaaacttttaatcctgtagtataggagttcaccttcttaggactagagactgtgccttatagctgttaattcatttccccctgaacatcaaatatgcctgaagagaagaaagtctagattcttctatgagtaacgccccctcctcactcaggtaaatgtgtctggggatgcctgtccagcttaaccacgtgcatttggcctatgtaatcctgcccatggtggccgcagctaatcagaatcagatggaaaattaaaccgggtaatctacttctaagccttaagaatattccctgggacacagacactataattggaagtgctgagctctggggcagaaggatcaggtgaccttcgcaacaaagtttgcccccacctcacataggacccggaagcagcctgagctgtggcggaggatccaggaagctacggagagaagcagccagcatggtgttccgtgcctcccggacgtttttcaggaggcctggttggacttgggttcctggatggtgggattgttgtacagcctctcaggagaccctgctgtcaagactgtgtgtgtggatttctcacccttagaagctctactaagacatcaacggaattagggccttcctttttgccttgtgagcgccaaggaaaagaaactatctcggtcacgtgagcgccagcgaaaagaaactgtatcagtcatccagagaccgtttattgcccaacacgttattcttgctgttggtggggtaactagccgaggaagacacagcgccttcccttcaggagttgcgtctcctctgcaggccacgatggtctgctctggagcattgggtgaacacacaggctggctgctctgggcagcgccttcactctgaccctggagaaccatttcatttcatcctggtcagtctagagtctgtgcaccaggcagtccatccactgaaggctgtgtttattcttttcctgtgcccctcataatggaagaaagtaaactgcttatcccgagcctta

SEQ ID NO: 26 - protein, 631 aa, homo sapiens
MNFNTILEEILIKRSQQKKKTSPLNYKERLFVLTKSMLTYYEGRAEKKYRKGFIDVSKIKCVEIVKNDDGVIPCQNKYPFQVVHDANTLYIFAPSPQSRDLWVKKLKEEIKNNNNIMIKYHPKFWTDGSYQCCRQTEKLAPGCEKYNLFESSIRKALPPAPETKKRRPPPPIPLEEEDNSEEIVVAMYDFQAAEGHDLRLERGQEYLILEKNDVHWWRARDKYGNEGYIPSNYVTGKKSNNLDQYEWYCRNMNRSKAEQLLRSEDKEGGFMVRDSSQPGLYTVSLYTKFGGEGSSGFRHYHIKETTTSPKKYYLAEKHAFGSIPEIIEYHKHNAAGLVTRLRYPVSVKGKNAPTTAGFSYEKWEINPSELTFMRELGSGLFGVVRLGKWRAQYKVAIKAIREGAMCEEDFIEEAKVMMKLTHPKLVQLYGVCTQQKPIYIVTEFMERGCLLNFLRQRQGHFSRDVLLSMCQDVCEGMEYLERNSFIHRDLAARNCLVSEAGVVKVSDFGMARYVLDDQYTSSSGAKFPVKWCPPEVFNYSRFSSKSDVWSFGVLMWEVFTEGRMPFEKYTNYEVVTMVTRGHRLYQPKLASNYVYEVMLRCWQEKPEGRPSFEDLLRTIDELVECEETFGR

SEQ ID NO: 27 - DNA, 7889 bp, homo sapiens
gtgcaggctgctcccggggtaggtgagggaagcgcggaggcggcgcgcgggggcagtggtcggcgagcagcgcggtcctcgctaggggcgcccacccgtcagtctctccggcgcgagccgccgccaccgcccgcgccggagtcaggcccctgggcccccaggctcaagcagcgaagcggcctccgggggacgccgctaggcgagaggaacgcgccggtgcccttgccttcgccgtgacccagcgtgcgggcggcgggatgagagggagccatcgggccgcgccggccctgcggccccgggggcggctctggcccgtgctggccgtgctggcggcggccgccgcggcgggctgtgcccaggcagccatggacgagtgcacggacgagggcgggcggccgcagcgctgcatgcccgagttcgtcaacgccgccttcaacgtgactgtggtggccaccaacacgtgtgggactccgcccgaggaatactgtgtgcagaccggggtgaccggggtcaccaagtcctgtcacctgtgcgacgccgggcagccccacctgcagcacggggcagccttcctgaccgactacaacaaccaggccgacaccacctggtggcaaagccagaccatgctggccggggtgcagtaccccagctccatcaacctcacgctgcacctgggaaaagcttttgacatcacctatgtgcgtctcaagttccacaccagccgcccggagagctttgccatttacaagcgcacacgggaagacgggccctggattccttaccagtactacagtggttcctgtgagaacacctactccaaggcaaaccgcggcttcatcaggacaggaggggacgagcagcaggccttgtgtactgatgaattcagtgacatttctcccctcactgggggcaacgtggccttttctaccctggaaggaaggcccagcgcctataactttgacaatagccctgtgctgcaggaatgggtaactgccactgacatcagagtaactcttaatcgcctgaacacttttggagatgaagtgtttaacgatcccaaagttctcaagtcctattattatgccatctctgattttgctgtaggtggcagatgtaaatgtaatggacacgcaagcgagtgtatgaagaacgaatttgataagctggtgtgtaattgcaaacataacacatatggagtagactgtgaaaagtgtcttcctttcttcaatgaccggccgtggaggagggcaactgcggaaagtgccagtgaatgcctgccctgtgattgcaatggtcgatcccaggaatgctacttcgaccctgaactctatcgttccactggccatgggggccactgtaccaactgccaggataacacagatggcgcccactgtgagaggtgccgagagaacttcttccgccttggcaacaatgaagcctgctcttcatgccactgtagtcctgtgggctctctaagcacacagtgtgatagttacggcagatgcagctgtaagccaggagtgatgggggacaaatgtgaccgttgccagcctggattccattctctcactgaagcaggatgcaggccatgctcttgtgatccctctggcagcatagatgaatgtaatattgaaacaggaagatgtgtttgcaaagacaatgtcgaaggcttcaattgtgaaagatgcaaacctggattttttaatctggaatcatctaatcctcggggttgcacaccctgcttctgctttgggcattcttctgtctgtacaaacgctgttggctacagtgtttattctatctcctctacctttcagattgatgaggatgggtggcgtgcggaacagagagatggctctgaagcatctctcgagtggtcctctgagaggcaagatatcgccgtgatctcagacagctactttcctcggtacttcattgctcctgcaaagttcttgggcaagcaggtgttgagttatggtcagaacctctccttctcctttcgagtggacaggcgagatactcgcctctctgcagaagaccttgtgcttgagggagctggcttaagagtatctgtacccttgatcgctcagggcaattcctatccaagtgagaccactgtgaagtatgtcttcaggctccatgaagcaacagattacccttggaggcctgctcttaccccttttgaatttcagaagctcctaaacaacttgacctctatcaagatacgtgggacatacagtgagagaagtgctggatatttggatgatgtcaccctggcaagtgctcgtcctgggcctggagtccctgcaacttgggtggagtcctgcacctgtcctgtgggatatggagggcagttttgtgagatgtgcctctcaggttacagaagagaaactcctaatcttggaccatacagtccatgtgtgctttgcgcctgcaatggacacagcgagacctgtgatcctgagacaggtgtttgtaactgcagagacaatacggctggcccgcactgtgagaagtgcagtgatgggtactatggagattcaactgcaggcacctcctccgattgccaaccctgtccgtgtcctggaggttcaagttgtgctgttgttcccaagacaaaggaggtggtgtgcaccaactgtcctactggcaccactggtaagagatgtgagctctgtgatgatggctactttggagaccccctgggtagaaacggccctgtgagactttgccgcctgtgccagtgcagtgacaacatcgatcccaatgcagttggaaattgcaatcgcttgacgggagaatgcctgaagtgcatctataacactgctggcttctattgtgaccggtgcaaagacggattttttggaaatcccctggctcccaatccagcagacaaatgcaaagcctgcaattgcaatctgtatgggaccatgaagcagcagagcagctgtaaccccgtgacggggcagtgtgaatgtttgcctcacgtgactggccaggactgtggtgcttgtgaccctggattctacaatctgcagagtgggcaaggctgtgagaggtgtgactgccatgccttgggctccaccaatgggcagtgtgacatccgcaccggccagtgtgagtgccagcccggcatcactggtcagcactgtgagcgctgtgaggtcaaccactttgggtttggacctgaaggctgcaaaccctgtgactgtcatcctgagggatctctttcacttcagtgcaaagatgatggtcgctgtgaatgcagagaaggctttgtgggaaatcgctgtgaccagtgtgaagaaaactatttctacaatcggtcttggcctggctgccaggaatgtccagcttgttaccggctggtaaaggataaggttgctgatcatagagtgaagctccaggaattagagagtctcatagcaaaccttggaactggggatgagatggtgacagatcaagccttcgaggatagactaaaggaagcagagagggaagttatggacctccttcgtgaggcccaggatgtcaaagatgttgaccagaatttgatggatcgcctacagagagtgaataacactctgtccagccaaattagccgtttacagaatatccggaataccattgaagagactggaaacttggctgaacaagcgcgtgcccatgtagagaacacagagcggttgattgaaatcgcatccagagaacttgagaaagcaaaagtcgctgctgccaatgtgtcagtcactcagccagaatctacaggggacccaaacaacatgactcttttggcagaagaggctcgaaagcttgctgaacgtcataaacaggaagctgatgacattgttcgagtggcaaagacagccaatgatacgtcaactgaggcatacaacctgcttctgaggacactggcaggagaaaatcaaacagcatttgagattgaagagcttaataggaagtatgaacaagcgaagaacatctcacaggatctggaaaaacaagctgcccgagtacatgaggaggccaaaagggccggtgacaaagctgtggagatctatgccagcgtggctcagctgagccctttggactctgagacactggagaatgaagcaaataacataaagatggaagctgagaatctggaacaactgattgaccagaaattaaaagattatgaggacctcagagaagatatgagagggaaggaacttgaagtcaagaaccttctggagaaaggcaagactgaacagcagaccgcagaccaactcctagcccgagctgatgctgccaaggccctcgctgaagaagctgcaaagaagggacgggataccttacaagaagctaatgacattctcaacaacctgaaagattttgataggcgtgtgaacgataacaagacggccgcagaggaggcactaaggaagattcctgccatcaaccagaccatcactgaagccaatgaaaagaccagagaagcccagcaggccctgggcagtgctgcggcggatgccacagaggccaagaacaaggcccatgaggcggagaggatcgcgagcgctgtccaaaagaatgccaccagcaccaaggcagaagctgaaagaacttttgcagaagttacagatctggataatgaggtgaacaatatgttgaagcaactgcaggaagcagaaaaagagctaaagagaaaacaagatgacgctgaccaggacatgatgatggcagggatggcttcacaggctgctcaagaagccgagatcaatgccagaaaagccaaaaactctgttactagcctcctcagcattattaatgacctcttggagcagctggggcagctggatacagtggacctgaataagctaaacgagattgaaggcaccctaaacaaagccaaagatgaaatgaaggtcagcgatcttgataggaaagtgtctgacctggagaatgaagccaagaagcaggaggctgccatcatggactataaccgagatatcgaggagatcatgaaggacattcgcaatctggaggacatcaggaagaccttaccatctggctgcttcaacaccccgtccattgaaaagccctagtgtctttagggctggaaggcagcatccctctgacaggggggcagttgtgaggccacagagtgccttgacacaaagattacatttttcagacccccactcctctgctgctgtccatgactgtccttttgaaccaggaaaagtcacagagtttaaagagaagcaaattaaacatcctgaatcgggaacaaagggttttatctaataaagtgtctcttccattcacgttgctaccttacccacactttcccttctgatttgcgtgaggacgtggcatcctacgttactgtacagtggcataagcacatcgtgtgagcccatgtatgctggggtagagcaagtagccctcccctgtctcatcgataccagcagaacctcctcagtctcagtactcttgtttctatgaaggaaaagtttggctactaacagtagcattgtgatggccagtatatccagtccatggataaagaaaatgcatctgcatctcctacccctcttccttctaagcaaaaggaaataaacatcctgtgccaaaggtattggtcatttagaatgtcggtagccatccatcagtgcttttagttattatgagtgtaggacactgagccatccgtgggtcaggatgcaattatttataaaagtctccaggtgaacatggctgaagatttttctagtatattaataattgactaggaagatgaactttttttcagatctttgggcagctgataatttaaatctggatgggcagcttgcactcaccaatagaccaaaagacatcttttgatattcttataaatggaacttacacagaagaaatagggatatgataaccactaaaattttgttttcaaaatcaaactaattcttacagcttttttattagttagtcttggaactagtgttaagtatctggcagagaacagttaatccctaaggtcttgacaaaacagaagaaaaacaagcctcctcgtcctagtcttttctagcaaagggataaaacttagatggcagcttgtactgtcagaatcccgtgtatccatttgttcttctgttggagagatgagacatttgacccttagctccagttttcttctgatgtttccatcttccagaatccctcaaaaaacattgtttgccaaatcctggtggcaaatacttgcactcagtatttcacacagctgccaacgctatcgagttcctgcactttgtgatttaaatccactctaaaccttccctctaagtgtagagggaagacccttacgtggagtttcctagtgggcttctcaacttttgatcctcagctctgtggttttaagaccacagtgtgacagttccctgccacacacccccttcctcctaccaacccacctttgagattcatatatagcctttaacactatgcaactttgtactttgcgtagcaggggcggggtggggggaaagaaactattatctgacacactggtgctattaattatttcaaatttatatttttgtgtgaatgttttgtgttttgtttatcatgattatagaataaggaatttatgtaaatatacttagtcctatttctagaatgacactctgttcactttgctcaatttttcctcttcactggcacaatgtatctgaatacctccttccctcccttctagaattctttggattgtactccaaagaattgtgccttgtgtttgcagcatctccattctctaaaattaatataattgctttcctccacacccagccactgtaaagaggtaacttgggtcctcttccattgcagtcctgatgatcctaacctgcagcacggtggttttacaatgttccagagcaggaacgccaggttgacaagctatggtaggattaggaaagtttgctgaagaggatctttgacgccacagtgggactagccaggaatgagggagaaatgccctttctggcaattgttggagctggataggtaagttttataagggagtacattttgactgagcacttagggcatcaggaacagtgctacttactgatgggtagactgggagaggtggtgtaacttagttcttgatgatcccacttcctgtttccatctgcttgggatataccagagtttaccacaagtgttttgacgatatactcctgagctttcactctgctgcttctcccaggcctcttctactatggcaggagatgtggcgtgctgttgcaaagttttcacgtcattgtttcctggctagttcatttcattaagtggctacatcctaacatatgcatttggtcaaggttgcagaagaggactgaagattgactgccaagctagtttgggtgaagttcactccagcaagtctcaggccacaatggggtggtttggtttggtttccttttaactttctttttgttatttgcttttctcctccacctgtgtggtatattttttaagcagaattttattttttaaaataaaaggttctttacaagatgataccttaattacactcccgcaacacagccattattttattgtctagctccagttatctgtattttatgtaatgtaattgacaggatggctgctgcagaatgctggttgacacagggattattatactgctatttttccctgaatttttttcctttgaattccaactgtggaccttttatatgtgccttcactttagctgtttgccttaatctctacagccttgctctccggggtggttaataaaatgcaacacttggcatttttatgttttaagaaaaacagtattttatttataataaaatctgaatatttgtaacccttta

SEQ ID NO: 28 - protein, 1609 aa, homo sapiens
MRGSHRAAPALRPRGRLWPVLAVLAAAAAAGCAQAAMDECTDEGGRPQRCMPEFVNAAFNVTVVATNTCGTPPEEYCVQTGVTGVTKSCHLCDAGQPHLQHGAAFLTDYNNQADTTWWQSQTMLAGVQYPSSINLTLHLGKAFDITYVRLKFHTSRPESFAIYKRTREDGPWIPYQYYSGSCENTYSKANRGFIRTGGDEQQALCTDEFSDISPLTGGNVAFSTLEGRPSAYNFDNSPVLQEWVTATDIRVTLNRLNTFGDEVFNDPKVLKSYYYAISDFAVGGRCKCNGHASECMKNEFDKLVCNCKHNTYGVDCEKCLPFFNDRPWRRATAESASECLPCDCNGRSQECYFDPELYRSTGHGGHCTNCQDNTDGAHCERCRENFFRLGNNEACSSCHCSPVGSLSTQCDSYGRCSCKPGVMGDKCDRCQPGFHSLTEAGCRPCSCDPSGSIDECNIETGRCVCKDNVEGFNCERCKPGFFNLESSNPRGCTPCFCFGHSSVCTNAVGYSVYSISSTFQIDEDGWRAEQRDGSEASLEWSSERQDIAVISDSYFPRYFIAPAKFLGKQVLSYGQNLSFSFRVDRRDTRLSAEDLVLEGAGLRVSVPLIAQGNSYPSETTVKYVFRLHEATDYPWRPALTPFEFQKLLNNLTSIKIRGTYSERSAGYLDDVTLASARPGPGVPATWVESCTCPVGYGGQFCEMCLSGYRRETPNLGPYSPCVLCACNGHSETCDPETGVCNCRDNTAGPHCEKCSDGYYGDSTAGTSSDCQPCPCPGGSSCAVVPKTKEVVCTNCPTGTTGKRCELCDDGYFGDPLGRNGPVRLCRLCQCSDNIDPNAVGNCNRLTGECLKCIYNTAGFYCDRCKDGFFGNPLAPNPADKCKACNCNLYGTMKQQSSCNPVTGQCECLPHVTGQDCGACDPGFYNLQSGQGCERCDCHALGSTNGQCDIRTGQCECQPGITGQHCERCEVNHFGFGPEGCKPCDCHPEGSLSLQCKDDGRCECREGFVGNRCDQCEENYFYNRSWPGCQECPACYRLVKDKVADHRVKLQELESLIANLGTGDEMVTDQAFEDRLKEAEREVMDLLREAQDVKDVDQNLMDRLQRVNNTLSSQISRLQNIRNTIEETGNLAEQARAHVENTERLIEIASRELEKAKVAAANVSVTQPESTGDPNNMTLLAEEARKLAERHKQEADDIVRVAKTANDTSTEAYNLLLRTLAGENQTAFEIEELNRKYEQAKNISQDLEKQAARVHEEAKRAGDKAVEIYASVAQLSPLDSETLENEANNIKMEAENLEQLIDQKLKDYEDLREDMRGKELEVKNLLEKGKTEQQTADQLLARADAAKALAEEAAKKGRDTLQEANDILNNLKDFDRRVNDNKTAAEEALRKIPAINQTITEANEKTREAQQALGSAAADATEAKNKAHEAERIASAVQKNATSTKAEAERTFAEVTDLDNEVNNMLKQLQEAEKELKRKQDDADQDMMMAGMASQAAQEAEINARKAKNSVTSLLSIINDLLEQLGQLDTVDLNKLNEIEGTLNKAKDEMKVSDLDRKVSDLENEAKKQEAAIMDYNRDIEEIMKDIRNLEDIRKTLPSGCFNTPSIEKP

SEQ ID NO: 29 - DNA, 3363 bp, homo sapiens
gacatagctgccctaaaaggaatgaggaagcgagagctctccagtgtctggctggctccgtccgtgtgacagcccatgatgttctttccggtctctgtaatattctgaatttccacctgcccgccccttcgcttataatgcagagcatgtgaagggagaccggctcggtctctctctctcccagtggactagaaggagcagagagttatgctgtttctcccattctttacagctcaccggatgtaaaagaactctggctagagaccctccaaggacagaggcacagccacacgggagtgaaatccacccctggacagtcagccgcaatactgatgaagctgagaagcagccacaatgcttcaaaaacactaaacgccaataatatggagacactaatcgaatgtcaatcagagggtgatatcaaggaacatcccctgttggcatcatgtgagagtgaagacagtatttgccagctcattgaagttaagaagagaaagaaggtgctgtcctggccctttctcatgagaaggctctcccctgcatcagatttttctggggctttggagacagacttgaaagcatcgctatttgatcagcccttgtcaattatctgcggtgacagtgacacactccccagacccatccaggacattctcactattctatgccttaaaggcccttcaacggaagggatattcaggagagcagccaacgagaaagcccgtaaggagctgaaggaggagctcaactctggggatgcggtggatctggagaggctccccgtgcacctcctcgctgtggtctttaaggacttcctcagaagtatcccccggaagctactttcaagcgacctctttgaggagtggatgggtgctctggagatgcaggacgaggaggacagaatcgaggccctgaaacaggttgcagataagctcccccggcccaacctcctgctactcaagcacttggtctatgtgctgcacctcatcagcaagaactctgaggtgaacaggatggactccagcaatctggccatctgcattggacccaacatgctcaccctggagaatgaccagagcctgtcatttgaagcccagaaggacctgaacaacaaggtgaagacactggtggaattcctcattgataactgctttgaaatatttggggagaacattccagtgcattccagtatcacttctgatgactccctggagcacactgacagttcagatgtgtcgaccctgcagaatgactcagcctacgacagcaacgaccctgatgtggaatccaacagcagcagtggcatcagctctcccagcaggcagccccaggtgcccatggccacagctgctggcttggatagcgcgggcccacaggatgcccgagaggtcagcccagagcccattgtgagcaccgtggccaggctgaaaagctccctcgcacagcccgataggagatactcagagcccagcatgccatcctcccaggagtgcctcgagagccgggtgacaaaccaaacactaacaaagagtgaaggggacttccccgtgccccgggtaggctctcgtttggaaagtgaggaggctgaagacccatttccagaggaggtcttccctgcagtgcaaggcaaaaccaagaggccggtggacctgaagatcaagaacttggccccgggttcggtgctcccgcgggcactggttctcaaagccttctccagcagctcgctggacgcgtcctctgacagctcgcccgtggcttctccttccagtcccaaaagaaatttcttcagcagacatcagtctttcaccacaaagacagagaaaggcaagcccagccgagaaattaaaaagcactccatgtctttcacctttgcccctcacaaaaaagtgctgaccaaaaacctcagcgcgggctctgggaaatcgcaagactttaccagggaccacgtcccgaggggtgtcagaaaggaaagccagcttgccggccgaatcgtgcaggaaaatgggtgtgaaacccacaaccaaacagcccgcggcttctgcctgagaccccacgccctctcggtggatgatgtgttccagggagctgactgggagaggcctggaagcccaccctcttatgaagaggccatgcagggcccggcagccagactagtggcctccgagagccagaccgtggggagcatgacggtggggagcatgagggcgaggatgctggaggcgcactgcctcctaccccctcttccacctgctcaccacgtagaggactcaagacacaggggcagcaaagagccactccctggccacggactctctcccctgcctgagcgatggaaacagagcagaactgtccatgcttctggggactctctggggcacgtgtctggcccagggagacctgagctcctcccgctgaggaccgtctccgagtccgtgcagaggaataagcgggactgtctcgtgcgacgatgtagccagccggtctttgaggctgaccaattccaatatgccaaagaatcgtatatttaggagggaggccatacgccatgccatagcttgtgctatctgtaaatatgagacttgtaaagaactgcctgtagattgtttttaaaaggtcttgaataagctccttgagaaagttgtggaaagccctcctcagtgaggatagctacaccatggccatggcgcatcagatagtctctgtgtacctggatttgtgcaatatgtaaaaatgtatcaaatgtattatagataaggtgttaggtgcaaaggatgtctaataatccctgcacacgttttgaacttgcagtgaagtacactgctgttccttgcttcctggggcacttttctcttggttagtgtttaaaaattatcttcgcttttttaatgtggcctcaaatgtcatgccaattttcacatcttccacaaactccatttagggagaaatgtttaaatctctggtataagtttactccataccagagtaaactatatattactctatataagcagtcttgcaataactaatcaccaccatagaagaaagaaacagactgcaaggaacagagttgagtgtctggagtcatcaaaggcattaaaaactccagtaaaagctggggccgtagcaaaaatcatgaaaaacacttcaacgtgtcctttcaatcatccaattaaatgtgggtagattaatgaaaatgtattacatcaatattaactcatctatagcactttgagtatctttgtagttcatgatatcctatcctataatgtggaggtaaatgattttatatgcattgggggtcatatataaaacttcaatgtaatttcactacaataaattgccttccttatttgaaagtaaaaa

SEQ ID NO: 30 - protein, 731 aa, homo sapiens
MKLRSSHNASKTLNANNMETLIECQSEGDIKEHPLLASCESEDSICQLIEVKKRKKVLSWPFLMRRLSPASDFSGALETDLKASLFDQPLSIICGDSDTLPRPIQDILTILCLKGPSTEGIFRRAANEKARKELKEELNSGDAVDLERLPVHLLAVVFKDFLRSIPRKLLSSDLFEEWMGALEMQDEEDRIEALKQVADKLPRPNLLLLKHLVYVLHLISKNSEVNRMDSSNLAICIGPNMLTLENDQSLSFEAQKDLNNKVKTLVEFLIDNCFEIFGENIPVHSSITSDDSLEHTDSSDVSTLQNDSAYDSNDPDVESNSSSGISSPSRQPQVPMATAAGLDSAGPQDAREVSPEPIVSTVARLKSSLAQPDRRYSEPSMPSSQECLESRVTNQTLTKSEGDFPVPRVGSRLESEEAEDPFPEEVFPAVQGKTKRPVDLKIKNLAPGSVLPRALVLKAFSSSSLDASSDSSPVASPSSPKRNFFSRHQSFTTKTEKGKPSREIKKHSMSFTFAPHKKVLTKNLSAGSGKSQDFTRDHVPRGVRKESQLAGRIVQENGCETHNQTARGFCLRPHALSVDDVFQGADWERPGSPPSYEEAMQGPAARLVASESQTVGSMTVGSMRARMLEAHCLLPPLPPAHHVEDSRHRGSKEPLPGHGLSPLPERWKQSRTVHASGDSLGHVSGPGRPELLPLRTVSESVQRNKRDCLVRRCSQPVFEADQFQYAKESYI

SEQ ID NO: 31 - DNA, 1534 bp, homo sapiens
tattgtcagagtcctcttgtttggccttctaggaaggctgtgggacccagctttcttcaaccagtccaggtggaggcctctgccttgaacgtttccaagtgaggtaaaacccgcaggcccagaggcctctctacttcctgtgtggggttcagaaaccctcctcccctcccagcctcaggtgcctgcttcagaaaatgaagtagtaagtctgctggcctccgccatcttagtaaagtaacagtcccatgaaacaaagatgcagtcgggcactcactggagagttctgggcctctgcctcttatcagttggcgtttgggggcaagatggtaatgaagaaatgggtggtattacacagacaccatataaagtctccatctctggaaccacagtaatattgacatgccctcagtatcctggatctgaaatactatggcaacacaatgataaaaacataggcggtgatgaggatgataaaaacataggcagtgatgaggatcacctgtcactgaaggaattttcagaattggagcaaagtggttattatgtctgctaccccagaggaagcaaaccagaagatgcgaacttttatctctacctgagggcaagagtgtgtgagaactgcatggagatggatgtgatgtcggtggccacaattgtcatagtggacatctgcatcactgggggcttgctgctgctggtttactactggagcaagaatagaaaggccaaggccaagcctgtgacacgaggagcgggtgctggcggcaggcaaaggggacaaaacaaggagaggccaccacctgttcccaacccagactatgagcccatccggaaaggccagcgggacctgtattctggcctgaatcagagacgcatctgaccctctggagaacactgcctcccgctggcccaggtctcctctccagtccccctgcgactccctgtttcctgggctagtcttggaccccacgagagagaatcgttcctcagcctcatggtgaactcgcgccctccagcctgatcccccgctccctcctccctgccttctctgctggtacccagtcctaaaatattgctgcttcctcttcctttgaagcatcatcagtagtcacaccctcacagctggcctgccctcttgccaggatatttatttgtgctattcactcccttccctttggatgtaacttctccgttcagttccctccttttcttgcatgtaagttgtcccccatcccaaagtattccatctacttttctatcgccgtccccttttgcagccctctctggggatggactgggtaaatgttgacagaggccctgccccgttcacagatcctggccctgagccagccctgtgctcctccctcccccaacactccctaccaaccccctaatcccctactccctccaccccccctccactgtaggccactggatggtcatttgcatctccgtaaatgtgctctgctcctcagctgagagagaaaaaaataaactgtatttggctgcaagaaaaaaaaaaaaaaaaaaaaaa

SEQ ID NO: 32 - protein, 207 aa, homo sapiens
MQSGTHWRVLGLCLLSVGVWGQDGNEEMGGITQTPYKVSISGTTVILTCPQYPGSEILWQHNDKNIGGDEDDKNIGSDEDHLSLKEFSELEQSGYYVCYPRGSKPEDANFYLYLRARVCENCMEMDVMSVATIVIVDICITGGLLLLVYYWSKNRKAKAKPVTRGAGAGGRQRGQNKERPPPVPNPDYEPIRKGQRDLYSGLNQRRI

SEQ ID NO: 33 - DNA, 2993 bp, homo sapiens
cgctggggcgctttccgaggaaattcgggactcgagtttcccggggaagaggcgcggcctgagcccggcgagggtggggagggcaggcgcaggtggaccccggcgccccccgagccccgctgtgaccttggccgcgggggaggggctgggccgctgcggggcagtcgcggccgccagagggggcagcggagaagaacttgcccaacttggcggcgcgggctggggcggctctgcgcctccgcgcccgcctccccggcctccgccttctcccctcccgcgagcctcctcccctcccgcgagcctcctcccctgggccctcctcccgtcctccccgccgccgccggtcccggtgcgcgcccatccctgcccgcagccccgcgcgccggccgagtcgctgagccgcggctgccggacgggacgggaccggctaggctgggcgcgccccccgggccccgccgtgggcatgggcgcactggcccgggcgctgctgctgcctctgctggcccagtggctcctgcgcgccgccccggagctggcccccgcgcccttcacgctgcccctccgggtggccgcggccacgaaccgcgtagttgcgcccaccccgggacccgggacccctgccgagcgccacgccgacggcttggcgctcgccctggagcctgccctggcgtcccccgcgggcgccgccaacttcttggccatggtagacaacctgcagggggactctggccgcggctactacctggagatgctgatcgggacccccccgcagaagctacagattctcgttgacactggaagcagtaactttgccgtggcaggaaccccgcactcctacatagacacgtactttgacacagagaggtctagcacataccgctccaagggctttgacgtcacagtgaagtacacacaaggaagctggacgggcttcgttggggaagacctcgtcaccatccccaaaggcttcaatacttcttttcttgtcaacattgccactatttttgaatcagagaatttctttttgcctgggattaaatggaatggaatacttggcctagcttatgccacacttgccaagccatcaagttctctggagaccttcttcgactccctggtgacacaagcaaacatccccaacgttttctccatgcagatgtgtggagccggcttgcccgttgctggatctgggaccaacggaggtagtcttgtcttgggtggaattgaaccaagtttgtataaaggagacatctggtatacccctattaaggaagagtggtactaccagatagaaattctgaaattggaaattggaggccaaagccttaatctggactgcagagagtataacgcagacaaggccatcgtggacagtggcaccacgctgctgcgcctgccccagaaggtgtttgatgcggtggtggaagctgtggcccgcgcatctctgattccagaattctctgatggtttctggactgggtcccagctggcgtgctggacgaattcggaaacaccttggtcttacttccctaaaatctccatctacctgagagacgagaactccagcaggtcattccgtatcacaatcctgcctcagctttacattcagcccatgatgggggccggcctgaattatgaatgttaccgattcggcatttccccatccacaaatgcgctggtgatcggtgccacggtgatggagggcttctacgtcatcttcgacagagcccagaagagggtgggcttcgcagcgagcccctgtgcagaaattgcaggtgctgcagtgtctgaaatttccgggcctttctcaacagaggatgtagccagcaactgtgtccccgctcagtctttgagcgagcccattttgtggattgtgtcctatgcgctcatgagcgtctgtggagccatcctccttgtcttaatcgtcctgctgctgctgccgttccggtgtcagcgtcgcccccgtgaccctgaggtcgtcaatgatgagtcctctctggtcagacatcgctggaaatgaatagccaggcctgacctcaagcaaccatgaactcagctattaagaaaatcacatttccagggcagcagccgggatcgatggtggcgctttctcctgtgcccacccgtcttcaatctctgttctgctcccagatgccttctagattcactgtcttttgattcttgattttcaagctttcaaatcctccctacttccaagaaaaataattaaaaaaaaaacttcattctaaaccaaaacagagtggattgggctgcaggctctatggggttcgttatgccaaagtgtctacatgtgccaccaacataaaacaaaaccaagccttggctcgttctcttctctcttcaatctctggaaaaataagtacatatagttgataacccctcttagcttacaggaagctttttgtattaattgcctttgaggttattttccgccagacctcaacctgggtcaaagtggtacaggaaggcttgcagtatgatggcaggagaatcagcctggggcctggggatgtaaccaagctgtacccttgagacctggaaccagagccacaggccccttttgtgggtttctctgtgctctgaatgggagccagaattcactaggaggtcatcaaccgatggtcctcacaagcctcttctgaagatggaaggccttttgcccgttgaggtagaggggaaggaaatctcctcttttgtacccaatacttatgttgtattgttggtgcgaaagtaaaaacactacctcttttgagactttgcccagggtcctgtgcctggatgggggtgcaggcagccttgaccacggctgttcccctcacccaaaagaattatcatcccaacagccaagacccaacaggtgctgaactgtgcatcaaccaggaagagttctatccccaagctggccactatcacatatgcttactcttgcttaaaattaataaatcatgttttgatgagaaaaaactattcta

SEQ ID NO: 34 - protein, 518 aa, homo sapiens
MGALARALLLPLLAQWLLRAAPELAPAPFTLPLRVAAATNRVVAPTPGPGTPAERHADGLALALEPALASPAGAANFLAMVDNLQGDSGRGYYLEMLIGTPPQKLQILVDTGSSNFAVAGTPHSYIDTYFDTERSSTYRSKGFDVTVKYTQGSWTGFVGEDLVTIPKGFNTSFLVNIATIFESENFFLPGIKWNGILGLAYATLAKPSSSLETFFDSLVTQANIPNVFSMQMCGAGLPVAGSGTNGGSLVLGGIEPSLYKGDIWYTPIKEEWYYQIEILKLEIGGQSLNLDCREYNADKAIVDSGTTLLRLPQKVFDAVVEAVARASLIPEFSDGFWTGSQLACWTNSETPWSYFPKISIYLRDENSSRSFRITILPQLYIQPMMGAGLNYECYRFGISPSTNALVIGATVMEGFYVIFDRAQKRVGFAASPCAEIAGAAVSEISGPFSTEDVASNCVPAQSLSEPILWIVSYALMSVCGAILLVLIVLLLLPFRCQRRPRDPEVVNDESSLVRHRWK

SEQ ID NO: 35 - DNA, 7580 bp, homo sapiens
ggcgaggatggggagcaatgcaaagctctgctcgccccccatctcaccccccaagcggatactggtcttctcgtcggattgcccatgcacttgttgcagaaacagccaaggccctggctgtggagaatgctgaaggaagaagacgcagaagcaggacgaccctgaaagattcagcctcttcatcctcaaacaggaccaggcctcctcttcccacctgtccagcagcatgaaagcagcatgattggccgaccgcaggagaagcccccagaaccaggcccccaactcagccatctgcggaggtcaaggtgtgagcgacgtctcctcaccacagtgctgtgtggtctatacctcagccagggagaggatgtgaaaccccccgccctgcacatgagtggtacaggccaacaggaacacctggctccagccacgttcacagacatgtcagccgtggagtagtgctgacacttttctctcagcttctcagggtttcagtccttttgggtttgttttatttaccttttttatggttttgtggctggacgttcacaaccaaggcagacagcatgggtgaccagcaactgtacaagaccaaccatgtggcccatggtagtgagaaccttttctaccaacagccaccacttggcgtccacagcgggctgaaccacaactatgggaatgcagttacagggggcggaatggatgcccctcaggcctcgccaatctccccccacttccctcaagatacacgggatggtctgggcttgcctgttggctccaaaaaccttggccaaatggatacctcgaggcagggagggtggggaagtcatgcagggcctggaaaccatgtccagctacgtggaaacctggccaactcaaacatgatgtggggggcaccagcccaggctgagcccactgatggctaccaatacacctactcccaggccagcgagatccggacccagaagcttaccagcggtgtcttacacaagctggactctttcacccaggtgtttgccaaccaaaacctgcgaattcaggtcaacaatatggcccaggtgctgcacactcagtcagcagtgatggatggagcccctgacagtgctctccgccagctgctgtctcagaagcccatggagcccccagcaccggctatcccttcccgctaccagcaggtgccccagcagcctcaccctggtttcactggtgggctgtccaaaccagctcttcaggtcgggcagcaccctacccaagggcacctgtattatgactaccagcagcctctggctcaggtgccagtgcagggaggacagccactgcaggccccacagatgctgtcacagcacatgcaacagatgcagcagcaccagtattacccaccgcagcaacagcagcaagccgggcaacagcgtatctccatgcaagaaatacagacgcagccgcaacaaattcgcccatcacagccacagccgccgccacagcagcagcagccgcagcagctacagctgcagcagcggcagggttcaatgcagatacctcagtattatcagccccaacccatgatgcagcacttgcaagagcagcagcagcaacagatgcacctgcagcctccttcttatcacagggaccctcaccagtataccccagagcaggcacacactgtccagctgattcccctgggctccatgtcccagtactactaccaggagccccagcagccctacagccaccccctctaccagcagagccacctgtcccagcaccagcagcgtgaggacagtcagctgaagacctactctagtgacagacaggcccaggccatgctgagctcccatggggacctggggcctcctgacacaggaatgggagacccagcgagctcagatctgacccgggtcagcagcaccctcccccatcgccccctcctatcccccagtgggatccacctcaacaacatggggcctcagcatcagcagctgtctcccagtgccatgtggccccagatgcacctacctgatgggagagcccagccagggtcccctgagtcaagtggccaacccaaaggagcgtttggggagcagtttgatgccaagaacaagctgacatgctccatctgcctgaaggagttcaagaacctgcctgccctgaatggccacatgcggtcccacgggggaatgagggcctcccccaacctcaaacaggaggaaggagagaaggtcctgccgcctcagccccagccaccactgccgcctccgcctccgcctccgccgccaccacagctccctcccgaggcagaaagcctcacgcctatggtcatgcccgtgtctgtccctgtcaagcttctcccgcccaagcccagctctcaggggttcaccaacagcaccgttgccgccccctccgccagagacaagccagccagctcgatgtcggacgacgagatgcctgtgctcgaaatccccaggaagcatcagccgagtgtgcccaaagccgaggagcccctcaagaccgtgcaggagaagaaaaagttccggcaccggccggaacctctcttcatcccgccgccgccctcctacaacccgaaccccgctgcctcctactcgggcgccaccctgtaccagagccagctgcgctccccgcgcgtcctcggggaccacctgctcctggaccccacccacgagctgcccccttacacgcccccacccatgctgagcccggtgcgccagggctcggggctcttcagcaatgtcctcatctccggccacggccctggcgcccacccgcagctgcccctgacgcccctgacgcccacaccacgggtgctgctgtgtcgctccaacagcatcgatggcagcaacgtgacggtcaccccagggcctggagagcagactgtagatgttgaaccacgcatcaacattggcttgagattccaagcagaaatccctgaactccaagatatctctgccctggcccaggacacacacaaggccacactggtatggaagccctggccagaactagaaaaccatgacctccagcaaagagtggagaatcttctgaatttgtgctgttccagtgcattgccaggtggagggaccaattctgaatttgctttgcactctctgtttgaggccaaaggtgatgtgatggttgctctggaaatgctgctactgcggaagcctgtcaggttaaaatgtcatcctttagcaaattaccactatgccggttcggacaagtggacctccctagaaagaaaactgtttaacaaagcactagccacttacagcaaagactttatttttgtacagaagatggtgaagtccaagacggtggctcagtgcgtggagtactactacacgtggaaaaagatcatgcggctggggcggaaacaccggacacgcctggcagaaatcatcgacgattgtgtgacaagtgaagaagaagaagagttagaggaggaggaggaggaggacccggaagaagataggaaatccacaaaagaagaagagagtgaggtgccgaagtccccggagccaccacccgtccccgtcctggctcccacggaggggccgcccctgcaggccctgggccagccctcaggctccttcatctgtgaaatgcccaactgtggggctgtgttcagctcccgacaggcactgaatggccatgcccgcatccacgggggcaccaaccaggtgaccaaggcccgaggtgccatcccctctgggaagcagaagcctggtggcacccagagtgggtactgttcggtaaagagctcaccctctcacagcaccaccagcggcgagacagaccccaccaccatcttcccctgcaaggagtgtggcaaagtcttcttcaagatcaaaagccgaaatgcacacatgaaaactcacaggcagcaggaggaacaacagaggcaaaaggctcagaaggcggcttttgcagctgagatggcagccacgattgagaggactacggggcccgtgggggcgccggggctgctgcccctggaccagctgagtctgatcaaacccatcaaggatgtggacatcctcgacgacgacgtcgtccagcagttgggaggtgtcatggaagaggctgaagttgtggacaccgatcttctcttggatgatcaagattcagtcttgcttcagggtgacgcagaactataaagccctgtgtgtcacttagagacagtgaaaacccacggcctccatcttcattaatcaggaaacctggactgcctgcttgttttgtaacccttttaaactacctgttttaaaagtggtcattttattcaggtttagaaaaaaaaatcctatttcttttccttttatttaaaaaaatttgtttttgtggggggttgggggaataaataattggcacaactatctttaagaggtgtttcatctgggctaccttctcatgaaatcattcccagtagggactgaagctgaccttcatgttccattgcattcagatgtcaaccatcccggttgccttttatcccaaagcttgctgtgagtgtgtgtgtgtgagacgcaggcgaccctcttagtactggggtcttggggccaacttttcccatcaagcgttactttgattctgttctgacctcattccatagtttgcagtgagcatggcatctttgcctggagatactatgctaggggcagctttccaggggcaaagcaagccctcgtgttacacggctctcctccagctcacacgacatgtgaggagatgaccaaatgtgaaaacaggtttcccctgtgttgcccgtcatcctttggcccgttcacaggaatggagtactgtataattttaggctttcattcccagcagtgtttactgaggacctggttttctagaacaggtgtgtcctgtcctcttccatgttccctgggggctggtcagctccaagttgtgggtggcagagctgtgtttcagcatgaactgactagagacccatctggaggcaaatattaagttgccaggactgctttcacttcagggtgattgaaggacacatattgaagtacctagaatgccagaaagtgttctattgcccaaaaaacaaatcagaaaagcctattcttttttgcaacgctgttaatgattagtggagttctgaaattactttgtgccacttggaagtactgtgaaaccgcattcactgggattttgctgtaattcacatccgctggactgaagtttaccttgatgttagctataagaaatagttttctaacacatacgatagcaaatacaagacaaatagcattgaaggccaacaaaaatggcttcagatacaccttagctataatgtttgcattcaaacaatgaatgtattcatcacaagtcacttaccaaagcacttctagacttctccaacctccatgactttgctctgcttcctcctgtccctgtcagcagggttgctgtttgtacttgaaggtaataaacctgtaatccttcaaaaatgccatttagccccaggcttctgagctgagtcagactgacccatcccaccgttagggcaaaagtcaggctgggacacagcgccagtacagagaggatcctgcttcatgcaactccccttttggagttaatgcagcgtgatttcctgggccggtgttttcaggcatcgcccaccccaggtatgctggttcccagctccacgtaggtgtgcctatcacgctgggccactttgctgacaacattcatagcttgacatgagagagaatatcagcagaagcatgagagtaggacctgacgtctttgactctgcaaaagcatttagcacacactcatgggggggaactggctgtgagccacagcagccccacacagacagtggtctctgaacttcaggaaagccatggacagaaaaaaaaataaaattcttttccatcattctattttcaaagaggtcttggcgttttcctacatcttttgtttagagggggaaaaaagtttcatttgctgccatttcagaaaggttatgctatcctgttttatccaagcagttgtgagtcaggaactgcctgggcagtgtgcatcaactttgtggccgaaccattacagctgtcatatccttggctgatcgtctctcccagggactactgccctccacttagtgtctgagggtaagcctagaagggtgctgctattgggtctatggaagcttatctatcaaaggagcaaacatccagaaaagtgtttataaagcaaatgtattgcctctgtttagagatttgcccagctgttccagttttaaacattaaaaaataaactcagttgccatggcaaaaatagaatgcacagcttacttataattttccatgcagtatagcataaggatttttgacttgaaacaaccaaagaactcctccttaacgagacagttcaaattcctgaattagtatttcttgactatcaacttaaagaatggacttcctagtacaatgttgcacttatttttttttctgaaataattctgcctgcatgtatgtgttgtgttttagcttctccccttaccccaccccaaagatcttttcttcctaatggttaatgtctcaactcggttactgtttactatcagatggtttttcattagtgaatttagacctctttgagaaagcttgtatataaaaagttaacagatatattttatggaaaaacccatcttattttcaaatatatttaactgctgttatattttattagaggaaggttgtaaatattttctaggagttctattgtaaagaaaagtatttttgaaaaaaattaatgtaataaaaaggaaaacatttttaaatagtggttgtgattgcttcctgttctggcttcgttatgttctattctcagcagatgaattgcatgccttccatatcaggatgtaatttattcaggtttgcactattataagttgacatcataatatctagtgtgcttaactgtattttcccggaatgcaagtcccttggtccatattaaagcactatgtatagcatattcataatttttcttttgtaacgtgtgtatttttaataaggattttatgtaacattttggcaacaagaggaccgtattttctagtgaattttataataacattttgctaaaaatgtttcttcctaggtcagtttttgttaaggtgaaccaaaagtcttattttaccaggggtttaaaaaaagtttgaagcttgaaagcaaagttatatttaaacatcatatgtaacaaataaataaagatgttttatagacttgtcctaaaaaggtgcattccttaaaaaaaaaaaaaagaaaaaaaaaggaaactggggcattctaggttgtttcccctccaagtgataagctttttttttttcttaattatcacaatgcttcttcaaaaagggaaccagggaaattttatttaacacattctaatcattagcctctcagaaagttattacagttcctatagatgggcattcatcaaatggagatgtaaccaaacagacactgtcatatttatttgtgaaaacctgattcaatattgcatcagctgctctgaaaataaaatattaatcttttgcgttt

SEQ ID NO: 36 - protein, 1200 aa, homo sapiens
MGDQQLYKTNHVAHGSENLFYQQPPLGVHSGLNHNYGNAVTGGGMDAPQASPISPHFPQDTRDGLGLPVGSKNLGQMDTSRQGGWGSHAGPGNHVQLRGNLANSNMMWGAPAQAEPTDGYQYTYSQASEIRTQKLTSGVLHKLDSFTQVFANQNLRIQVNNMAQVLHTQSAVMDGAPDSALRQLLSQKPMEPPAPAIPSRYQQVPQQPHPGFTGGLSKPALQVGQHPTQGHLYYDYQQPLAQVPVQGGQPLQAPQMLSQHMQQMQQHQYYPPQQQQQAGQQRISMQEIQTQPQQIRPSQPQPPPQQQQPQQLQLQQRQGSMQIPQYYQPQPMMQHLQEQQQQQMHLQPPSYHRDPHQYTPEQAHTVQLIPLGSMSQYYYQEPQQPYSHPLYQQSHLSQHQQREDSQLKTYSSDRQAQAMLSSHGDLGPPDTGMGDPASSDLTRVSSTLPHRPLLSPSGIHLNNMGPQHQQLSPSAMWPQMHLPDGRAQPGSPESSGQPKGAFGEQFDAKNKLTCSICLKEFKNLPALNGHMRSHGGMRASPNLKQEEGEKVLPPQPQPPLPPPPPPPPPPQLPPEAESLTPMVMPVSVPVKLLPPKPSSQGFTNSTVAAPSARDKPASSMSDDEMPVLEIPRKHQPSVPKAEEPLKTVQEKKKFRHRPEPLFIPPPPSYNPNPAASYSGATLYQSQLRSPRVLGDHLLLDPTHELPPYTPPPMLSPVRQGSGLFSNVLISGHGPGAHPQLPLTPLTPTPRVLLCRSNSIDGSNVTVTPGPGEQTVDVEPRINIGLRFQAEIPELQDISALAQDTHKATLVWKPWPELENHDLQQRVENLLNLCCSSALPGGGTNSEFALHSLFEAKGDVMVALEMLLLRKPVRLKCHPLANYHYAGSDKWTSLERKLFNKALATYSKDFIFVQKMVKSKTVAQCVEYYYTWKKIMRLGRKHRTRLAEIIDDCVTSEEEEELEEEEEEDPEEDRKSTKEEESEVPKSPEPPPVPVLAPTEGPPLQALGQPSGSFICEMPNCGAVFSSRQALNGHARIHGGTNQVTKARGAIPSGKQKPGGTQSGYCSVKSSPSHSTTSGETDPTTIFPCKECGKVFFKIKSRNAHMKTHRQQEEQQRQKAQKAAFAAEMAATIERTTGPVGAPGLLPLDQLSLIKPIKDVDILDDDVVQQLGGVMEEAEVVDTDLLLDDQDSVLLQGDAEL

SEQ ID NO: 37 - DNA, 1237 bp, homo sapiens
gctgcagaggattcctgcagaggatcaagacagcacgtggacctcgcacagcctctcccacaggtaccatgaaggtctccgcggcagccctcgctgtcatcctcattgctactgccctctgcgctcctgcatctgcctccccatattcctcggacaccacaccctgctgctttgcctacattgcccgcccactgccccgtgcccacatcaaggagtatttctacaccagtggcaagtgctccaacccagcagtcgtctttgtcacccgaaagaaccgccaagtgtgtgccaacccagagaagaaatgggttcgggagtacatcaactctttggagatgagctaggatggagagtccttgaacctgaacttacacaaatttgcctgtttctgcttgctcttgtcctagcttgggaggcttcccctcactatcctaccccacccgctccttgaagggcccagattctaccacacagcagcagttacaaaaaccttccccaggctggacgtggtggctcacgcctgtaatcccagcactttgggaggccaaggtgggtggatcacttgaggtcaggagttcgagaccagcctggccaacatgatgaaaccccatctctactaaaaatacaaaaaattagccgggcgtggtagcgggcgcctgtagtcccagctactcgggaggctgaggcaggagaatggcgtgaacccgggaggcggagcttgcagtgagccgagatcgcgccactgcactccagcctgggcgacagagcgagactccgtctcaaaaaaaaaaaaaaaaaaaaaaatacaaaaattagccgggcgtggtggcccacgcctgtaatcccagctactcgggaggctaaggcaggaaaattgtttgaacccaggaggtggaggctgcagtgagctgagattgtgccacttcactccagcctgggtgacaaagtgagactccgtcacaacaacaacaacaaaaagcttccccaactaaagcctagaagagcttctgaggcgctgctttgtcaaaaggaagtctctaggttctgagctctggctttgccttggctttgccagggctctgtgaccaggaaggaagtcagcatgcctctagaggcaaggaggggaggaacactgcactcttaagcttccgccgtctcaacccctcacaggagcttactggcaaacatgaaaaatcggcttaccattaaagttctcaatgcaaccataaaaaaaaaa

SEQ ID NO: 38 - protein, 91 aa, homo sapiens
MKVSAAALAVILIATALCAPASASPYSSDTTPCCFAYIARPLPRAHIKEYFYTSGKCSNPAVVFVTRKNRQVCANPEKKWVREYINSLEMS

SEQ ID NO: 39 - DNA, 2747 bp, homo sapiens
tgctctgtgctgggatcatggaacttgcactgctgtgtgggctggtggtgatggctggtgtgattccaatccagggcgggatcctgaacctgaacaagatggtcaagcaagtgactgggaaaatgcccatcctctcctactggccctacggctgtcactgcggactaggtggcagaggccaacccaaagatgccacggactggtgctgccagacccatgactgctgctatgaccacctgaagacccaggggtgcagcatctacaaggactattacagatacaacttttcccaggggaacatccactgctctgacaagggaagctggtgtgagcagcagctgtgtgcctgtgacaaggaggtggccttctgcctgaagcgcaacctggacacctaccagaagcgactgcgtttctactggcggccccactgccgggggcagacccctgggtgctagaagcccacaccctctaccctgttcctcagcatggagctctggcatccccacctcagtatctaacctgaaccagcctggcttttcaaacactccggggggaggtagtcccagcctcccccggaaccctctaccaatgccttctgaccttctgaagctttccgaatcctcccagttgaggcagtagctgtgtcctctgagggtggatgggaatcttgggagaagcccaagcaagggagccctcagaggtggtgtttggaccaaagcatcggggtgggggaggggtctgccgctgtcccccacctgctggcccccttgtccttcctcaccccctccaatatagtctcggagctacaaccgcagcagccactataaagggcaatattgatctttctgtccatgtggctctatcttttaaaacctcaaggccctccactgtcctaagataaagcctctcataggcactggggaccctgcacagtctggccatgtgaccctctccccaggcaagctctgaagtccctgcaggtggaggccatgcctgtcttaaactcagttgcatccctggtgcccaaagcaacaccagaaccaagaaggagctccataaatccttcttgggtgaagcctagacaaagccgccaggtcttgtggctccaggcaccagagccttgagtactttctcctgcctccaggcattggctcagggtgaattacaaggggctactgaatggctattactttcatcacgactgatccccacctcctcagggtcaaagggctactttctggaagtctccccaggctgactccttctccctgactgcaagggctcactccctcctccaagctcccacaatgcttcatggctctgccgcttacctagcttggcctagagtggcaaatggaacttctctgatctcccccaactagactggagcccccgaaggatggagaccatgtctgtgccatctctgtttcccctgttttcccacatactaggtgctcaattcatgcctgtgaatggcgtgagcccataatggatacacagaggttgcagcagatggtgtgggtacctcacccagatatcatccaggcccaaggcccctctccctgagtgaggccaggtgttggcagccaactgctccaatctgcctccttcccctaaatactgccctggtctagtgggagctgccttccccctgccccacctctcccaccaagaggccacctgtcactcatggccaggagagtgacaccatggagggtacaattgccagctcccccgtgtctgtgcaggattgtctgggttgaatgacactctcaaattgttcctgggatcgggctgaggccaggcctctcctggaaccacctctctgcttggtctgaccccttggcctatccagttttcctggttccctcacaggtttctccagaaagtactccctcagtaaagcatttgcacaagaatccttgtctcaggctctgcttctaaggaaagagactgaagagggacaactttttcctatgaggactcccaatctgccatttgtgtgtggctagctgtttccagccagggggctgaggcacctgcagtcacccacactctgggcctgtggcaccatctgtgcctcagctgactgagcagttctgagatgtggtgactcatgtgaagtggtgtcataggaatgaaggactgtgggcgctgggttcaaattccagttctatgcaccactccaggtagggatacccatgggggcagctgtgcctgtgtgggggaacagggtagggaaatctccataccttctcaattttgctgtgaacctaaaactgccatataaagataaagtctaggccaggcatggtggctcatgcctgtaatcccaacacttagggtggctgaggcaggcagatcacctggggtcaggagttcaagaccagcctgcccaacatggcaaaacctcgtctctactaaaaatacaaaaattagccaggcatcgtggtgggtgcctgtaatcccagctattcaggaggctgaggcaggagaatcacttggacctgggaggcagaggtttcagtgagcccagatcgcgacactgcactccagcctgggcaacagagtgacactctgtctcaaaaaataaaataaaataaaataaaataaaataaaataaaataaaaaaaaaaaaaaaaaaaaaaaaaaaaaaaaaaaaaaaaaaaaaaaaaaaaaaaaaaaaaaaaaaaaaaaaaaaaaaaaaaaaaaaaaaaaaaaaaaaaaaaaaaaaaaaaaaaaaaaaa

SEQ ID NO: 40 - protein, 145 aa, homo sapiens
MELALLCGLVVMAGVIPIQGGILNLNKMVKQVTGKMPILSYWPYGCHCGLGGRGQPKDATDWCCQTHDCCYDHLKTQGCSIYKDYYRYNFSQGNIHCSDKGSWCEQQLCACDKEVAFCLKRNLDTYQKRLRFYWRPHCRGQTPGC

SEQ ID NO: 41 - DNA, 3050 bp, homo sapiens
tttttttgcttctgccccagatctttcctggacagtgcgtctcagcagttcagatccgggggcccccagctgacagagggcgtggggggttaaggcattaacccctcccagcctcttcctgaagaaaccacccagccttggcgcggcgctgggtgacttcgcgtagcaggcagggaactggccgcggcgagcgggactggccattggagtgctccgctgcggagggaggggaccccgactcgagtaagtttgcgagagcactacgcagtcagtcgggggcagcagcaagatgcgaagcgagccgtacagatcccgggctctccgaacgcaacttcgccctgcttgagcgaggctgcggtttccgaggccctctccagccaaggaaaagctacacaaaaagcctggatcactcatcgaaccacccctgaagccagtgaaggctctctcgcctcgccctctagcgttcgtctggagtagcgccaccccggcttcctggggacacagggttggcaccatggggcccaccagcgtcccgctggtcaaggcccaccgcagctcggtctctgactacgtcaactatgatatcatcgtccggcattacaactacacgggaaagctgaatatcagcgcggacaaggagaacagcattaaactgacctcggtggtgttcattctcatctgctgctttatcatcctggagaacatctttgtcttgctgaccatttggaaaaccaagaaattccaccgacccatgtactattttattggcaatctggccctctcagacctgttggcaggagtagcctacacagctaacctgctcttgtctggggccaccacctacaagctcactcccgcccagtggtttctgcgggaagggagtatgtttgtggccctgtcagcctccgtgttcagtctcctcgccatcgccattgagcgctatatcacaatgctgaaaatgaaactccacaacgggagcaataacttccgcctcttcctgctaatcagcgcctgctgggtcatctccctcatcctgggtggcctgcctatcatgggctggaactgcatcagtgcgctgtccagctgctccaccgtgctgccgctctaccacaagcactatatcctcttctgcaccacggtcttcactctgcttctgctctccatcgtcattctgtactgcagaatctactccttggtcaggactcggagccgccgcctgacgttccgcaagaacatttccaaggccagccgcagctctgagaagtcgctggcgctgctcaagaccgtaattatcgtcctgagcgtcttcatcgcctgctgggcaccgctcttcatcctgctcctgctggatgtgggctgcaaggtgaagacctgtgacatcctcttcagagcggagtacttcctggtgttagctgtgctcaactccggcaccaaccccatcatttacactctgaccaacaaggagatgcgtcgggccttcatccggatcatgtcctgctgcaagtgcccgagcggagactctgctggcaaattcaagcgacccatcatcgccggcatggaattcagccgcagcaaatcggacaattcctcccacccccagaaagacgaaggggacaacccagagaccattatgtcttctggaaacgtcaactcttcttcctagaactggaagctgtccacccaccggaagcgctctttacttggtcgctggccaccccagtgtttggaaaaaaatctctgggcttcgactgctgccagggaggagctgctgcaagccagagggaggaagggggagaatacgaacagcctggtggtgtcgggtgttggtgggtagagttagttcctgtgaacaatgcactgggaagggtggagatcaggtcccggcctggaatatattttctacccccctggagctttgattttgcactgagccaaaggtctagcattgtcaagctcctaaagggttcatttggcccctcctcaaagactaatgtccccatgtgaaagcgtctctttgtctggagctttgaggagatgttttccttcactttagtttcaaacccaagtgagtgtgtgcacttctgcttctttagggatgccctgtacatcccacaccccaccctcccttcccttcatacccctcctcaacgttcttttactttatactttaactacctgagagttatcagagctggggttgtggaatgatcgatcatctatagcaaataggctatgttgagtacgtaggctgtgggaagatgaagatggtttggaggtgtaaaacaatgtccttcgctgaggccaaagtttccatgtaagcgggatccgttttttggaatttggttgaagtcactttgatttctttaaaaaacatcttttcaatgaaatgtgttaccatttcatatccattgaagccgaaatctgcataaggaagcccactttatctaaatgatattagccaggatccttggtgtcctaggagaaacagacaagcaaaacaaagtgaaaaccgaatggattaacttttgcaaaccaagggagatttcttagcaaatgagtctaacaaatatgacatctgtctttggcacttttgttgatgtttatttcagaatgttgtgtgattcatttcaagcaacaacatggttgtattttgttgtgttaaaagtacttttcttgatttttgaatgtatttgtttcagcagaagtcattttattggatttttctaacccgtgttaacaccattgaatgtgtatttcttaagaaaataccaccctcttgtgcccttaaaagcattactttaactggtagggaacgccagaaacttttcagtccagctattcattagatagtaattgaagatatgtataaatattacaaagaataaaaatatattactgtctctttagtatggttttcagtgcaattaaaccgagagatgtcttgtttttttaaaaagaatagtatttaataggtttctgacttttgtggatcattttgcacatagctttatcaacttttaaacattaataaactgatttttttaaagatc

SEQ ID NO: 42 - protein, 382 aa, homo sapiens
MGPTSVPLVKAHRSSVSDYVNYDIIVRHYNYTGKLNISADKENSIKLTSVVFILICCFIILENIFVLLTIWKTKKFHRPMYYFIGNLALSDLLAGVAYTANLLLSGATTYKLTPAQWFLREGSMFVALSASVFSLLAIAIERYITMLKMKLHNGSNNFRLFLLISACWVISLILGGLPIMGWNCISALSSCSTVLPLYHKHYILFCTTVFTLLLLSIVILYCRIYSLVRTRSRRLTFRKNISKASRSSEKSLALLKTVIIVLSVFIACWAPLFILLLLDVGCKVKTCDILFRAEYFLVLAVLNSGTNPIIYTLTNKEMRRAFIRIMSCCKCPSGDSAGKFKRPIIAGMEFSRSKSDNSSHPQKDEGDNPETIMSSGNVNSSS

SEQ ID NO: 43 - DNA, 9071 bp, homo sapiens
atgccgctgccaccgcggagcctgcaggtgctcctgctgctgctgctgttgctgctgctgctgccgggcatgtgggctgaggcaggcttgcccagggcaggcgggggttcacagccccccttccgcaccttctcggccagcgactggggcctcacccacctagtggtgcatgagcagacaggcgaggtgtatgtgggcgcagtgaaccgcatctataagctgtcggggaacctgacactgctgcgggcccacgtcacgggccctgtggaggacaacgagaagtgctacccgccgcccagcgtgcagtcctgcccccacggcctgggcagtactgacaacgtcaacaagctgctgctgctggactatgccgctaaccgcctgctggcctgtggcagcgcctcccagggcatctgccagttcctgcgtctggacgatctcttcaaactgggtgagccacaccaccgtaaggagcactacctgtccagcgtgcaggaggcaggcagcatggcgggcgtgctcattgccgggccaccgggccagggccaggccaagctcttcgtgggcacacccatcgatggcaagtccgagtacttccccacactgtccagccgtcggctcatggccaacgaggaggatgccgacatgttcggcttcgtgtaccaggatgagtttgtgtcatcacagctcaagatcccttcggacacgctgtccaagttcccggcctttgacatctactatgtgtacagcttccgcagcgagcagtttgtctactacctcacgctgcagctagacacacagctgacctcgcctgatgccgccggcgagcacttcttcacgtccaagatcgtgcggctctgtgtggacgaccccaaattctactcgtacgttgagttccccattggctgcgagcaggcgggtgtggagtaccgcctggtgcaggatgcctacctgagccggcccggccgtgccctggcccaccagctgggcctggctgaggacgaggacgtgctgttcactgtgttcgcccagggccagaagaaccgcgtgaagccaccaaaggagtcagcactgtgcctgttcacgctcagggccatcaaggagaagattaaggagcgcatccagtcctgctaccgtggtgagggcaagctctccctgccgtggctgctcaacaaggagctgggctgcatcaactcgcccctgcagatcgatgacgacttctgcgggcaggacttcaaccagcccctggggggcacagtcaccattgaggggacgcccctgttcgtggacaaggatgatggcctgaccgccgtggctgcctatgactatcggggccgcactgtggtattcgccggcacgcgaagtggccgcatccgcaagatcctggtggacctctcaaaccccggtggccggcctgccctggcctacgagagcgtcgtggcccaggagggcagccccatcctgcgagacctcgtcctcagccccaaccaccagtacctctacgccatgaccgagaagcaggtgacgcgggtgcctgtggagagctgtgtgcagtacacgtcctgtgagctgtgtctggggtcacgggacccccactgtggctggtgtgtcctgcacagcatctgctcgcggcgggacgcctgtgagcgagcagacgagccccagcgctttgctgcggacctgctgcagtgtgtgcagctgactgtgcagccccgcaatgtgtctgtcaccatgtcccaggtcccacttgtgctgcaggcctggaacgtgcctgacctctcagctggcgtcaactgctccttcgaggacttcacggaatctgagagcgtcctggaggatggccggatccactgccgctcaccctccgcccgggaggtggcgcccatcacgcggggccagggagaccagcgggtggtgaaactctacctaaagtccaaggagacagggaagaagtttgcgtctgtggacttcgtcttctacaactgcagcgtccaccagtcctgcctgtcctgtgtcaacggctcctttccctgccactggtgcaaataccgccacgtgtgcacacacaacgtggctgactgcgccttcctggagggccgtgtcaacgtgtctgaggactgcccacagatcctgccctccacgcagatctacgtgccagtgggagtggtaaaacccatcaccctggccgcacggaacctgccacagccacagtcaggccagcgtggatatgagtgcctcttccacatcccgggcagcccggcccgtgtcaccgccctgcgcttcaacagctccagcctgcagtgccagaattcctcgtactcctacgaggggaacgatgtcagcgacctgccagtgaacctgtcagtcgtgtggaacggcaactttgtcattgacaacccacagaacatccaggcgcacctctacaagtgcccggccctgcgcgagagctgcggcctctgcctcaaggccgacccgcgcttcgagtgcggatggtgcgtggccgagcgccgctgctccctgcgacaccactgcgctgccgacacacctgcatcgtggatgcacgcgcgtcacggcagcagtcgctgcaccgaccccaagatcctcaagctgtcccccgagacgggcccgaggcagggcggcacgcggctcactatcacaggcgagaacctgggcctgcgattcgaagacgtgcgtctgggcgtgcgcgtgggcaaggtgctgtgcagccctgtggagagcgagtacatcagtgcggagcagatcgtctgtgagatcggggacgccagctccgtgcgtgcccatgacgccctggtggaggtgtgtgtgcgggactgctcaccacactaccgcgccctgtcacccaagcgcttcaccttcgtgacaccaaccttctaccgtgtgagcccctcccgtgggcctctgtcagggggcacctggattggcatcgagggaagccacctgaacgcaggcagtgatgtggctgtgtcggtcggtggccggccctgctccttctcctggaggaactcccgtgagatccggtgcctgacaccccccgggcagagccctggcagcgctcccatcatcatcaacatcaaccgcgcccagctcaccaaccctgaggtgaagtacaactacaccgaggaccccaccatcctgaggatcgaccccgagtggagcatcaacagcggtgggaccctcctgacggtcacaggcaccaacctggccactgtccgtgaaccccgaatccgggccaagtatggaggcattgagagggagaacggctgcctggtgtacaatgacaccaccatggtatgccgcgccccgtctgtggccaaccctgtgcgcagcccaccagagctgggggagcggccggatgagctgggcttcgtcatggacaacgtgcgctccctgcttgtgctcaactccacctccttcctctactaccctgaccccgtactggagccactcagccccactggcctgctggagctgaagcccagctccccactcatcctcaagggccggaacctcttgccacctgcacccggcaactcccgactcaactacacggtgctcatcggctccacaccctgtaccctcaccgtgtcggagacgcaactgctgtgcgaggcgcccaacctcactgggcagcacaaggtcacggtgcgggcaggtggcttcgagttctcgccagggacactgcaggtgtactcggacagcctgctgacgctgcctgccattgtgggcattggcggaggcgggggtctcctgctgctggtcatcgtggctgtgctcatcgcctacaagcgcaagtcacgagatgctgaccgcacactcaagcggctgcagctccagatggacaacctggagtcccgcgtggccctcgaatgcaaggaagcctttgcagagctgcagacagacatccacgagctgaccaatgacctggacggtgccggcatccccttccttgactaccggacatatgccatgcgggtgctctttcctgggatcgaggaccaccctgtgctcaaggagatggaggtgcaggccaatgtggagaagtcgctgacactgttcgggcagctgctgaccaagaagcacttcctgctgaccttcatccgcacgctggaggcacagcgcagcttctccatgcgcgaccgcgggaatgtggcctcgctcatcatgacggccctgcagggcgagatggaatacgccacaggcgtgctcaagcagctgctttccgacctcatcgagaagaacctggagagcaagaaccaccccaagctgctactgcgccggactgagtcggtggcagagaagatgctaactaactggttcaccttcctcttgtataagttcctcaaggagtgcgctggggagccgctgttcatgctgtactgcgccatcaagcagcagatggagaagggccccattgacgccatcacgggtgaggcacgctactccctgagtgaggacaagctcatccggcagcagattgactacaagacactgaccctgaactgtgtgaaccctgagaatgagaatgcacctgaggtgccggtgaaggggctggactgtgacacggtcacccaggccaaggagaagctgctggacgctgcctacaagggcgtgccctactcccagcggcccaaggccgcggacatggacctggagtggcgccagggccgcatggcgcgcatcatcctgcaggacgaggacgtcaccaccaagattgacaacgattggaagaggctgaacacactggctcactaccaggtgacagacgggtcctcggtggcactggtgcccaagcagacgtccgcctacaacatctccaactcctccaccttcaccaagtccctcagcagatacgagagcatgctgcgcacggccagcagccccgacagcctgcgctcgcgcacgcccatgatcacgcccgacctggagagcggcaccaagctgtggcacctggtgaagaaccacgaccacctggaccagcgtgagggtgaccgcggcagcaagatggtctcggagatctacttgacacggctactggccaccaagggcacactgcagaagtttgtggacgacctgtttgagaccatcttcagcacggcacaccggggctcagccctgccgctggccatcaagtacatgttcgacttcctggatgagcaggccgacaagcaccagatccacgatgctgacgtgcgccacacctggaagagcaactgcctgcccctgcgcttctgggtgaacgtgatcaagaacccacagtttgtgttcgacattcacaagaacagcatcacggacgcctgcttgtcggtggtggcccagaccttcatggactcctgctccacctctgagcacaagctgggcaaggactcaccctccaacaagctgctctacgccaaggacatccccaactacaagagctgggtggagaggtactatgcagacatcgccaagatgccagccatcagcgaccaggacatgagtgcgtatctggctgagcagtcccgcctgcacctgagccagttcaacagcatgagcgccttgcacgagatctactcctacatcaccaagtacaaggatgagatcctggcagccctggagaaggatgagcaggcgcggcggcagcggctgcggagcaagctggagcaggtggtggacacgatggccctgagcagctgagccccagctgtgatcatccagcatgatgcagcgtgaggacagctgagcagggaccgggacagccctcaccgcatgcgtgtggagtgtccggtggtgctcgggccgccgcagtgcagcgactgcccggccctccctcccctgcctcacccggtcgggtcccggctcttcctgtgtggaggtgatggtacctgccacaccacagctgcgcacacagctgcttgctcaggggccgggacagcactgggtgctcaggctggccaaggaccttcattgcctggcaagagctgcccagtggccttcatgggagaagggctgacctctgaggggctgaggggtgaggccagggccctccagggggaggggtagccagcttgggctgtccccttgagaccaggacaagaggctgggggtgtcagcattcccagctttccaagctgcccccaggcggcagagtctgagggtcccggggcccggttggcagctggagaaagaggcaaaaagcccgtagccgggcaagaggagctcaagtcggtctgggcccgttgccaccgactcccacctccagcacccatgcccgctgcaccgctgccatcctcagattcaccgcgtgctctgcgcggccgaggccggagcaccacatccacctcgccccagagaggctctgctccctcctatggaggggctgtgggccaggctgctcagactcctgggtggcttccagacggaccgggcagcccctctccgtcctcagggctgtgcctctgggagccactgggccaggggccccgggtcgcagagagcacgttcccgttatttattcccctccgcgtcctacacaggctgccctggcagctgtcttcaagggtaggctgagctccccaccctggagcccctgagggcggcccctgagcactcctctctctccactctctctgtccctgccccagcggcttccagtgtggcatctcagcagtgtcctggcccctccagagcagtgggacatctggggactgtttttgtgtttaggggaaaaaattctgctgcactctgcttgggccttgaggtctgtggcagggctcctctggcccgcagtggcctggatctatctgggccatgagtgacgggcagtgaccagagggactggaggccagcggtgtccacccttgccctcagcaagagagaatgcattcttaaaagaaagctgtacatgtatatatatgcatatatatatatgtggctctagcctcaggctccagccccagtggggtactgtacagttaactgaagaagaattttaaagacgatttgaacaagaaaatgaaggcagtgggaaagcaatgccaaatggttgtggagaaagtggccggagcctccctggagtggagcagccctgaagcctgtgccccccgacctgcgggccgctgttttggtttgacatgacaaggaaaggacttcctgctgaccctgagagcctctggggtgccgcggcaccacggggcatgcatgattgtgctagcgtttagtctgagttgatctttttaaaactgcaagtgttgaatactagaggttgttagacccttttttatgttttttaattaatcagtcacttgtaaaagcaaacaagcggtccatccccttttcaaggtcacttttttgatggtaccgaagatcccatggacattaagggacagctaactgtggccagactcagccccatgtccttggccaggcccaaggagaggactcggccccatggggtgtgccagtcttgcagtccgccccagctgagtagcgtgagccagatgacgccacagagacccgcctcttccctgaacgcgggtcggtgtggagtcagtgactgctgactcagggagctccttggccccgtgggcactgtgccagggctggggccttctgctgctgccacacccagctcaggcctgggccagcccctgcccccagcccactgagggggtgggcttactccctgggcagtcttgggggccagagctgaggccagtccatattacagtggctgggctgtttttttcagtagcccctagcattggctgggattcctgttcctgggtgcgcctccacctcccttctgatgtttcctggctatggtggggtgggaacctcagtttcccccaaagtcttccctggatgctggcttcaggttgaagtccctggttcttccagttcctcacgggttaggtaggggctcctgcatcaccttcagaatccagttccaacccccactctccttaggccttgtgctctgctctgccctgccaggctgcccttgtccatgtgagtagcatgggcgggtggtggggacggcagtggtgatgaagggggtgcaccacaggcctcatgaagcagttcccacatgggcgtgtggctggggcgtggccaccacagagcacatggctgtgtctaggcgcaagcactttagcagtatctgtttacatgcgcaaggatcaagccgactacctgtgctgtctactgggacagcagtctccgagctactccgtacctccctctgccaggtcgtggagttaggccccagtccctacttgtcactggttcccactgtgctcctaactgtgcagcacctgggagctctggcctggggctggaggccctggtaggagctgcagttggaggccgttctgtgcccagcagcggtgagcggctcccatgggccctgtgtctgcagggagccagggctgcggcacatgtgctgtgaaactggcacccacctggcgtgctgctgccgccacttgcttcctgcagcacctcctaccctgctccgtgtcctccctctccccgcgcctggctcaggagtgctggaaaagctcacgcctcggcctgggagcctggcctcttgatatacctcgagcttcccctgtgctccccagccccaggaccactggccccttggcctgaggggctgggggccccacgacctgcagcgtcgagtccgggagagagcccggagcggcgtgccatctcggctcggccttgctgagagcctccgccctggctttctccctgtctggattcagtggctcacgttggtgctacacagctagaatagatatatttagagagagagatatttttaagacaaagcccacaattagctgtcctttaacaccgcagaaccccctcccagaagaagagcgatccctcggacggtccgggcgggcaccctcagccgggctctttgcagaagcagcaccgctgactgtgggcccggccctcagatgtgtacatatacggctatttcctattttactgttcttcagatttagtacttgtaaataaacacacacattaaggagagattaaacatttttgctaaaagctaaaaa

SEQ ID NO: 44 - protein, 1896 aa, homo sapiens
MPLPPRSLQVLLLLLLLLLLLPGMWAEAGLPRAGGGSQPPFRTFSASDWGLTHLVVHEQTGEVYVGAVNRIYKLSGNLTLLRAHVTGPVEDNEKCYPPPSVQSCPHGLGSTDNVNKLLLLDYAANRLLACGSASQGICQFLRLDDLFKLGEPHHRKEHYLSSVQEAGSMAGVLIAGPPGQGQAKLFVGTPIDGKSEYFPTLSSRRLMANEEDADMFGFVYQDEFVSSQLKIPSDTLSKFPAFDIYYVYSFRSEQFVYYLTLQLDTQLTSPDAAGEHFFTSKIVRLCVDDPKFYSYVEFPIGCEQAGVEYRLVQDAYLSRPGRALAHQLGLAEDEDVLFTVFAQGQKNRVKPPKESALCLFTLRAIKEKIKERIQSCYRGEGKLSLPWLLNKELGCINSPLQIDDDFCGQDFNQPLGGTVTIEGTPLFVDKDDGLTAVAAYDYRGRTVVFAGTRSGRIRKILVDLSNPGGRPALAYESVVAQEGSPILRDLVLSPNHQYLYAMTEKQVTRVPVESCVQYTSCELCLGSRDPHCGWCVLHSICSRRDACERADEPQRFAADLLQCVQLTVQPRNVSVTMSQVPLVLQAWNVPDLSAGVNCSFEDFTESESVLEDGRIHCRSPSAREVAPITRGQGDQRVVKLYLKSKETGKKFASVDFVFYNCSVHQSCLSCVNGSFPCHWCKYRHVCTHNVADCAFLEGRVNVSEDCPQILPSTQIYVPVGVVKPITLAARNLPQPQSGQRGYECLFHIPGSPARVTALRFNSSSLQCQNSSYSYEGNDVSDLPVNLSVVWNGNFVIDNPQNIQAHLYKCPALRESCGLCLKADPRFECGWCVAERRCSLRHHCAADTPASWMHARHGSSRCTDPKILKLSPETGPRQGGTRLTITGENLGLRFEDVRLGVRVGKVLCSPVESEYISAEQIVCEIGDASSVRAHDALVEVCVRDCSPHYRALSPKRFTFVTPTFYRVSPSRGPLSGGTWIGIEGSHLNAGSDVAVSVGGRPCSFSWRNSREIRCLTPPGQSPGSAPIIININRAQLTNPEVKYNYTEDPTILRIDPEWSINSGGTLLTVTGTNLATVREPRIRAKYGGIERENGCLVYNDTTMVCRAPSVANPVRSPPELGERPDELGFVMDNVRSLLVLNSTSFLYYPDPVLEPLSPTGLLELKPSSPLILKGRNLLPPAPGNSRLNYTVLIGSTPCTLTVSETQLLCEAPNLTGQHKVTVRAGGFEFSPGTLQVYSDSLLTLPAIVGIGGGGGLLLLVIVAVLIAYKRKSRDADRTLKRLQLQMDNLESRVALECKEAFAELQTDIHELTNDLDGAGIPFLDYRTYAMRVLFPGIEDHPVLKEMEVQANVEKSLTLFGQLLTKKHFLLTFIRTLEAQRSFSMRDRGNVASLIMTALQGEMEYATGVLKQLLSDLIEKNLESKNHPKLLLRRTESVAEKMLTNWFTFLLYKFLKECAGEPLFMLYCAIKQQMEKGPIDAITGEARYSLSEDKLIRQQIDYKTLTLNCVNPENENAPEVPVKGLDCDTVTQAKEKLLDAAYKGVPYSQRPKAADMDLEWRQGRMARIILQDEDVTTKIDNDWKRLNTLAHYQVTDGSSVALVPKQTSAYNISNSSTFTKSLSRYESMLRTASSPDSLRSRTPMITPDLESGTKLWHLVKNHDHLDQREGDRGSKMVSEIYLTRLLATKGTLQKFVDDLFETIFSTAHRGSALPLAIKYMFDFLDEQADKHQIHDADVRHTWKSNCLPLRFWVNVIKNPQFVFDIHKNSITDACLSVVAQTFMDSCSTSEHKLGKDSPSNKLLYAKDIPNYKSWVERYYADIAKMPAISDQDMSAYLAEQSRLHLSQFNSMSALHEIYSYITKYKDEILAALEKDEQARRQRLRSKLEQVVDTMALSS

SEQ ID NO: 45 - DNA, 5010 bp, homo sapiens
ccccgggagcccagccagagcgagcgccggggccgggcgcgcaggagtgaaaaggaggcggcggccgcagctgcgagcaacagatccggacgccgcgagctgacccgctctgctgttgggcgatttttttttaattgcagaaaaatttattaaattggaaaatcttgcgtttttcaatggcgctggccccgggtcagcgggcgattttctctgcatcaagatgggctttgccgtttccgtagtgggcaccagtggtggcctgattgtcagtcttctcccggcatttttaaggccaggagccgagcgctgcttgtaggcgaataccctacagagcggtttggctttttaaattactgttattattttgggcagagaacagtcggtctggtgcaccccgtcctcgctgcagaagaggctgcgagtccgaggtgggtctctcggaaggtgaaattccttctggggtgagcgagccccggccccgcgcgcagtccagcggccccgcgtgtgtgccctcgccctgccggagccgggaaaatggaggctgtgattgagaaggaatgcagcgcgctcggaggcctcttccagaccatcatcagcgacatgaaggggagctatccagtttgggaagatttcataaacaaagcaggaaagctgcagtcccagcttcggacaacagtagtagcagcagctgccttcttggacgcctttcagaaagtggctgacatggccaccaacacacgtggtgggaccagggagattggatctgctctcaccaggatgtgcatgaggcacagaagcattgaagccaagctgaggcagttttcgagcgctttaattgattgtctgataaacccacttcaagaacagatggaagaatggaagaaagtggccaaccagctggataaagaccacgcaaaagaatataagaaagcccgccaagagataaaaaagaagtcctcggatacgctgaaactgcagaagaaagcaaaaaaagggagaggtgatatccagcctcagttggacagtgctctccaagatgtcaatgataagtatctcttattggaagaaacagaaaagcaggctgtccggaaggctttgattgaagaacgtggccgattctgtaccttcatctctatgctgcggccagtgattgaagaagaaatctcaatgctaggggaaataacccaccttcagaccatctcggaagatctaaaaagcctgaccatggaccctcacaaactgccctcctcaagtgaacaggtgattctggacttgaaaggttctgattacagctggtcgtatcagacgccaccctcttcccccagcaccaccatgtccagaaagtccagtgtctgcagcagcctgaacagtgtcaacagcagtgactcccggtccagcggctcccactcgcattcccccagctcacattaccgctaccgcagctccaacctggcccagcaggctcctgtgaggctgtccagcgtgtcctcccatgactcaggattcatatcccaggatgccttccagtccaagtcaccatcccccatgccgccagaggcccccaaccagttgtctaacgggttttctcactatagtttatcaagtgagtcccacgtggggcccacgggtgcaggccttttccctcattgcctgcctgcctcccgcctgctccctcgggtcacctctgtccaccttccagactacgctcattattacaccattgggcccggcatgttcccgtcatctcagatccctagctggaaggactgggctaagcctgggccctatgaccagcctctggtgaacaccctgcagcgccgcaaagagaagcgagaaccggaccccaacgggggaggacccactaccgccagcggcccacctgcagcagctgaggaggctcagagaccacggagcatgactgtatcggctgccaccaggcctggtgaggagatggaggcttgtgaggagctggccctggccctgtctcggggcctgcagctggacacccagaggagcagccgggactcgcttcagtgctccagcggctacagcacccagacaaccaccccctgctgctctgaggacaccatcccttcccaagtttcagattatgattatttctctgtaagtggtgaccaggaggcagatcagcaggagttcgacaagtcctccaccattccaagaaacagcgacatcagccagtcctaccgacggatgttccaagccaagcgtccagcctcaactgctggcctccccaccaccctgggacctgctatggtcactccaggggttgcaactatccgacggaccccttccaccaagccttctgtccgccggggaaccattggagctggtcccatccccatcaagacacccgtgatccctgtcaagaccccaaccgtcccagacctcccaggggtgttgccagcccctccagatgggccagaagagcggggggagcacagccctgagtcgccatctgtgggtgagggcccccaaggtgtcaccagcatgccctcctcaatgtggagcggccaagcttccgttaaccctccacttccaggcccgaagcccagtatccctgaggagcacagacaggcaattccagaaagtgaagctgaagaccaggaacgggaacccccaagtgccactgtctccccaggccagattccagagagtgaccctgcagacctgagcccaagggatactccacaaggagaagacatgctgaacgccatccgaaggggcgtgaaactgaagaagaccacgacaaacgatcgctcagcccctcgcttttcttaggttcacaagaaatgcgccggtggggaatgaactgtttcattaataaaacctaatttgtcttgatccattccactctataataaaacaaaagattttgtaggcaactcggaatatagctcttttgaaagtactcgacacctttagataagaattaaaaccaacctatgtaactgacataatcttgatcttttaatttgtaaatattgacaattttctttctgcacattttaatcttagtttcccttttgatttttctgaaggtgccaaattccatttaacttttttacaagtctttgtaaaattttaaatgcataaagggggttggggcaggggaaccacgaagtagttaattttagaaaaggatttactatacttcactcttctttttttttccccacaagcttttgtagatgcattgtagtagtctagcttagaagcaaatgcaagttattttaatgtacaaactaaatgggtaagaggtaaaatcttcatttaaatatactatgttctggatgaaaagagcaggagtaacaattgatgagcaatattcagagtgaagtaaatctggaaatggtagactgtgttgggattggggggagggccatgggaggggtacatcgtcaacatagccgatcctgttacatttaagagtagcctcgtaggttgaatttcttctggtagcttcatggtaaatgcatccgaataagccatactggattgcagtgtttgtttctgtagggtgtttaaggacttgacttcctttctcccatgattcctctggactgcacacagcacccacaaccagccccatgcatgctgctgcctctgggcagtcgtagaatctcccacttcagtttctcgttgattgtactcacctttatggaatccaaatacatccaaaagggtaaggcagttttaaaaatgtgaaaacatttaaaaatgataatagcagggaattcttagattatagtaaatgccttttacttaactgtgcccagcaggctgggtgcgttaaaaagcccaagtattttgaaaaaactcgaacagatttgacaagggtagccagcttggagtctagcaacttgccaatgtgtttaccaatctgggggcttgtttttcttttcttctttcaaataaatggcagttaactggctttacagtaaacattgaagagaggaggatttgtttattgtcactgggaatctgaccactatactgtcctttttttgtattctgggtaaatgttttttggaaaagatttgtcttttctaagtggaagttaaatttgttatactgcccatcccctaaagccaacagagatttgtagatttaaagggatcacatttgaagacaatagtgtttaagaaagcaagcaagtcccttagcagtcaggtcataacagggcacatttctgaccgaaccctctcaaggcagaggaggagtttggtgggtttcatacaccctgcagattcctgttggctctaaccctcaattacctaatcttatgctttaacacataactgcattggatgtgagagtaacgtaccgtatggtcattgttctatatattaacattgaacactgctgcgattgctcaaggacattttatgttacggctttaaagcaaaggcatgattattagaaactatttaagcttttttctttgaaaaacaagctccttttacagaatataaacaacagtagtgcctgtggtttagcccaccaatcttgatgactaaaagtagctgatgcattgtgcatatgatgcttgagatggtttttgcaaaagcagaaatcgctgcaaggtaatcacaatagataaaagtggtattttaaacctttgaaataaatggatgtaactgtaccttggtacagcttttcacttgtttagtttttaaacgttagtataatctgaataaataaaatgttgccaaattcaatgtagaaagaatgtgacaacacaccttgggtagttctgcttgtgtttttgcatattgtaaaagcagtgtcacagctaaaaagaaagaaatcgtttctaacagtaaattattgtgctttagttgctagtttgtactgagagttgacctctccctgtgcagttttttgttctaaacttgtataaataacaattgtgtaatgtgtctccctcctacattgtaacaattgcttcagcctacgttataaataaagaaccactagattaaaaaa

SEQ ID NO: 46 - protein, 755 aa, homo sapiens
MEAVIEKECSALGGLFQTIISDMKGSYPVWEDFINKAGKLQSQLRTTVVAAAAFLDAFQKVADMATNTRGGTREIGSALTRMCMRHRSIEAKLRQFSSALIDCLINPLQEQMEEWKKVANQLDKDHAKEYKKARQEIKKKSSDTLKLQKKAKKGRGDIQPQLDSALQDVNDKYLLLEETEKQAVRKALIEERGRFCTFISMLRPVIEEEISMLGEITHLQTISEDLKSLTMDPHKLPSSSEQVILDLKGSDYSWSYQTPPSSPSTTMSRKSSVCSSLNSVNSSDSRSSGSHSHSPSSHYRYRSSNLAQQAPVRLSSVSSHDSGFISQDAFQSKSPSPMPPEAPNQLSNGFSHYSLSSESHVGPTGAGLFPHCLPASRLLPRVTSVHLPDYAHYYTIGPGMFPSSQIPSWKDWAKPGPYDQPLVNTLQRRKEKREPDPNGGGPTTASGPPAAAEEAQRPRSMTVSAATRPGEEMEACEELALALSRGLQLDTQRSSRDSLQCSSGYSTQTTTPCCSEDTIPSQVSDYDYFSVSGDQEADQQEFDKSSTIPRNSDISQSYRRMFQAKRPASTAGLPTTLGPAMVTPGVATIRRTPSTKPSVRRGTIGAGPIPIKTPVIPVKTPTVPDLPGVLPAPPDGPEERGEHSPESPSVGEGPQGVTSMPSSMWSGQASVNPPLPGPKPSIPEEHRQAIPESEAEDQEREPPSATVSPGQIPESDPADLSPRDTPQGEDMLNAIRRGVKLKKTTTNDRSAPRFS

SEQ ID NO: 47 - DNA, 2672 bp, homo sapiens
cttccagagagcaatatggctggttccccaacatgcctcaccctcatctatatcctttggcagctcacagggtcagcagcctctggacccgtgaaagagctggtcggttccgttggtggggccgtgactttccccctgaagtccaaagtaaagcaagttgactctattgtctggaccttcaacacaacccctcttgtcaccatacagccagaagggggcactatcatagtgacccaaaatcgtaatagggagagagtagacttcccagatggaggctactccctgaagctcagcaaactgaagaagaatgactcagggatctactatgtggggatatacagctcatcactccagcagccctccacccaggagtacgtgctgcatgtctacgagcacctgtcaaagcctaaagtcaccatgggtctgcagagcaataagaatggcacctgtgtgaccaatctgacatgctgcatggaacatggggaagaggatgtgatttatacctggaaggccctggggcaagcagccaatgagtcccataatgggtccatcctccccatctcctggagatggggagaaagtgatatgaccttcatctgcgttgccaggaaccctgtcagcagaaacttctcaagccccatccttgccaggaagctctgtgaaggtgctgctgatgacccagattcctccatggtcctcctgtgtctcctgttggtgcccctcctgctcagtctctttgtactggggctatttctttggtttctgaagagagagagacaagaagagtacattgaagagaagaagagagtggacatttgtcgggaaactcctaacatatgcccccattctggagagaacacagagtacgacacaatccctcacactaatagaacaatcctaaaggaagatccagcaaatacggtttactccactgtggaaataccgaaaaagatggaaaatccccactcactgctcacgatgccagacacaccaaggctatttgcctatgagaatgttatctagacagcagtgcactcccctaagtctctgctcaaaaaaaaaacaattctcggcccaaagaaaacaatcagaagaattcactgatttgactagaaacatcaaggaagaatgaagaacgttgacttttttccaggataaattatctctgatgcttctttagatttaagagttcataattccatccactgctgagaaatctcctcaaacccagaaggtttaatcacttcatcccaaaaatgggattgtgaatgtcagcaaaccataaaaaaagtgcttagaagtattcctatagaaatgtaaatgcaaggtcacacatattaatgacagcctgttgtattaatgatggctccaggtcagtgtctggagtttcattccatcccagggcttggatgtaaggattataccaagagtcttgctaccaggagggcaagaagaccaaaacagacagacaagtccagcagaagcagatgcacctgacaaaaatggatgtattaattggctctataaactatgtgcccagcactatgctgagcttacactaattggtcagacgtgctgtctgccctcatgaaattggctccaaatgaatgaactactttcatgagcagttgtagcaggcctgaccacagattcccagagggccaggtgtggatccacaggacttgaaggtcaaagttcacaaagatgaagaatcagggtagctgaccatgtttggcagatactataatggagacacagaagtgtgcatggcccaaggacaaggacctccagccaggcttcatttatgcacttgtgctgcaaaagaaaagtctaggttttaaggctgtgccagaacccatcccaataaagagaccgagtctgaagtcacattgtaaatctagtgtaggagacttggagtcaggcagtgagactggtggggcacggggggcagtgggtacttgtaaacctttaaagatggttaattcattcaatagatatttattaagaacctatgcggcccggcatggtggctcacacctgtaatcccagcactttgggaggccaaggtgggtgggtcatctgaggtcaggagttcaagaccagcctggccaacatggtgaaaccccatctctactaaagatacaaaaatttgctgagcgtggtggtgtgcacctgtaatcccagctactcgagaggccaaggcatgagaatcgcttgaacctgggaggtggaggttgcagtgagctgagatggcaccactgcactccggcctaggcaacgagagcaaaactccaatacaaacaaacaaacaaacacctgtgctaggtcagtctggcacgtaagatgaacatccctaccaacacagagctcaccatctcttatacttaagtgaaaaacatggggaaggggaaaggggaatggctgcttttgatatgttccctgacacatatcttgaatggagacctccctaccaagtgatgaaagtgttgaaaaacttaataacaaatgcttgttgggcaagaatgggattgaggattatcttctctcagaaaggcattgtgaaggaattgagccagatctctctccctactgcaaaaccctattgtagtaaaaaagtcttctttactatcttaataaaacagatattgtgagattcaaaaaaaaaaaaaaaa

SEQ ID NO: 48 - protein, 335 aa, homo sapiens
MAGSPTCLTLIYILWQLTGSAASGPVKELVGSVGGAVTFPLKSKVKQVDSIVWTFNTTPLVTIQPEGGTIIVTQNRNRERVDFPDGGYSLKLSKLKKNDSGIYYVGIYSSSLQQPSTQEYVLHVYEHLSKPKVTMGLQSNKNGTCVTNLTCCMEHGEEDVIYTWKALGQAANESHNGSILPISWRWGESDMTFICVARNPVSRNFSSPILARKLCEGAADDPDSSMVLLCLLLVPLLLSLFVLGLFLWFLKRERQEEYIEEKKRVDICRETPNICPHSGENTEYDTIPHTNRTILKEDPANTVYSTVEIPKKMENPHSLLTMPDTPRLFAYENVI

SEQ ID NO: 49 - DNA, 2008 bp, homo sapiens
ctcccgtcccccttccgccgcgtgggtgccatggcaacggagagagacggcaacctgggttccggaagccggagagctggagctttgaagccaccccggtcaaaggatgctgagtccggagcgcctagccctaccggactacgagtatctggctcagcgacatgtcctcacctacatggaggatgcagtgtgccagctgctagaaaacagggaagatattagccaatatggaattgccaggttcttcactgaatattttaacagtgtatgccagggaacacacattctctttcgagaattcagcttcgtccaagccaccccccacaatagggtatcatttttacgggccttctggagatgcttccgaactgtgggcaaaaatggcgatttgctgaccatgaaagaatatcactgtttgctgcaattactgtgtcctgatttcccgctggagctcactcagaaagcagccaggattgtgctcatggacgatgccatggactgcttgatgtctttttcagatttcctctttgccttccagatccagttttactactcagaattcctggacagtgtggctgccatctatgaggacctgctgtcaggcaagaaccccaacacagtgattgtgccgacgtcgtccagtgggcagcaccgccaacgacctgccttgggcggggccggcacgctggagggcgtggaggcgtcgctgttctaccagtgtctggaaaacctgtgtgatcggcacaagtacagctgcccacccccagcacttgtcaaagaggccctcagcaatgttcagagactgaccttctatggattcctcatggctctctcaaagcaccgtggaatcaaccaagccctcggagctttgcctgacaagggggatctgatgcacgacccagcaatggatgaagagctggaacggctgtaagtgtcaagtgggaggatactgcccccttgtgggggccagacgggtcggacacggctgtgccccatctggggccaacaccacttgtctgtaacatcccacatctgccagggaagggtctgggggccagtggaggcctgaggtgtccctccctctgagtcctttgggggctgcagcccaggggtttaccctagtgttaagagtgggcatggaggccctgctctctgtacaggaggcctctcgctgccctccaggcttcttcccttcttcaggctggcccaggtcccaggcctggtcaactcggtcacagccagtccagaggccagttgcctgccttcccggacccctccccgggttggctctccctggagacctctccatcattcccgaaaagtggatggagagagtgatggctccactgaagagacagacgagtcggagacttgaggagtccaaagggtcctgcccacagcgccctgtacctgctcccacccagcccttggtgtgcccacccagcctcctctccagcaccttgctgtgctgccctctgctgctgacaaggtgaataacagccccaagaccagccagaggggctctgatgatcagcccagccagtggccccggaaggtgaatggcctgctctccctggccctatcagcctgtgaacttcacttaggccccaagctgacagactgtgctgaggccaccttgtcacgccgtagcctgttagtcctcctaacctcttaagagcagtctcttctgagccagcctctgcgggtcccccaataaggttcatctcctcacagcaactccattaagggggagaacccgaatagccacgcagggccttgcaccatcaagggtgacacctgcgacgcaagtaccaggaggacataaccgctgtggcctgttggagaacagccagtagccttggtaatatgaagggtgggccagaagatgatttcacttgcaaaaactgcttcaagtcttgacccctttgtgtctaatagctaaacaaacatgtgaaacgaataaaaagtccctcatgtctggtaaaaaaaaaaaaaaaaaaaaaaaaaa

SEQ ID NO: 50 - protein, 274 aa, homo sapiens
MLSPERLALPDYEYLAQRHVLTYMEDAVCQLLENREDISQYGIARFFTEYFNSVCQGTHILFREFSFVQATPHNRVSFLRAFWRCFRTVGKNGDLLTMKEYHCLLQLLCPDFPLELTQKAARIVLMDDAMDCLMSFSDFLFAFQIQFYYSEFLDSVAAIYEDLLSGKNPNTVIVPTSSSGQHRQRPALGGAGTLEGVEASLFYQCLENLCDRHKYSCPPPALVKEALSNVQRLTFYGFLMALSKHRGINQALGALPDKGDLMHDPAMDEELERL

SEQ ID NO: 51 - DNA, 1272 bp, homo sapiens
ccaaagaaagcaaggggaccaaggccgggactgctggggtgaaggtccgggaggctgagtaaggggacggaagggcacaggccatggaaaggaatgacatcatcaacttcaaggctttggagaaagagctgcaggctgcactcactgctgatgagaagtacaaacgggagaatgctgccaagttacgggcagtggaacagagggtggcttcctatgaggagttcaggggtattgtccttgcatcacatctgaagccactggagcggaaggataagatgggaggaaagagaactgtgccctggaactgtcacactattcagggaaggaccttccaggatgtggccactgaaatctccccggagaaagcccccctccagcccgagacgtctgctgacttctatcgtgattggcgacgacacttgccaagtgggccagagcgctaccaggctctactgcagcttgggggtccaaggctcggctgcctcttccagacagatgtgggatttggacttcttggggagctgctggtggcactggctgatcacgtggggccggctgaccgggcagcggtgctggggatcctatgcagcctggcgagcactgggcgcttcaccctgaacctaagcctgctgagccgggcagagagagagagctgcaagggcttgtttcagaagctgcaagccatgggcaaccccagatccgtgaaggaggggctcagctgggaggagcagggtctggaggagcagtctggtgggctccaggaggaggagaggctcctgcaggagctgctggagctgtaccaggttgactgatgcagcaagctaccctcagaggtcccagtggtcactggaggcagttttttggttgttgtcttgggggttctgcaggaccataataagaaacccacacctggttcccttctcaacttggaattttcagagcaaaaacaggaatcaagtcttccccacttctccagtccctcagtgtctcgctgttttgaactgtgtgtatccatggacagtcaagagctcaggaagttgagagcggttttgtttcccacccttagagtctgccaagcctctagcccactggccttgagagatgagtgtgtgcccaaccaaatgctggctataccagttacagcctccactcataaaagggaaaaagcaaaatctttatggtaaacaaacactgatctccacagctcttaacaagaatgtttatagccccaaaccaatgaatggacatgtaatcaaaaaaaaaaaaaaaaaa

SEQ ID NO: 52 - protein, 242 aa, homo sapiens
MERNDIINFKALEKELQAALTADEKYKRENAAKLRAVEQRVASYEEFRGIVLASHLKPLERKDKMGGKRTVPWNCHTIQGRTFQDVATEISPEKAPLQPETSADFYRDWRRHLPSGPERYQALLQLGGPRLGCLFQTDVGFGLLGELLVALADHVGPADRAAVLGILCSLASTGRFTLNLSLLSRAERESCKGLFQKLQAMGNPRSVKEGLSWEEQGLEEQSGGLQEEERLLQELLELYQVD

SEQ ID NO: 53 - DNA, 3672 bp, homo sapiens
agtaaaccacagccttcagcatgctctgctcaggcggcagcagtggctttttggaggtgtctcggccatgacacacatttgacatgccctccctcaacctacttatagactatttttcttgctctgcagcatggaccaaagagaaattctgcagaagttcctggatgaggcccaaagcaagaaaattactaaagaggagtttgccaatgaatttctgaagctgaaaaggcaatctaccaagtacaaggcagacaaaacctatcctacaactgtggctgagaagcccaagaatatcaagaaaaacagatataaggatattttgccctatgattatagccgggtagaactatccctgataacctctgatgaggattccagctacatcaatgccaacttcattaagggagtttatggacccaaggcttatattgccacccagggtcctttatctacaaccctcctggacttctggaggatgatttgggaatatagtgtccttatcattgttatggcatgcatggagtatgaaatgggaaagaaaaagtgtgagcgctactgggctgagccaggagagatgcagctggaatttggccctttctctgtatcctgtgaagctgaaaaaaggaaatctgattatataatcaggactctaaaagttaagttcaatagtgaaactcgaactatctaccagtttcattacaagaattggccagaccatgatgtaccttcatctatagaccctattcttgagctcatctgggatgtacgttgttaccaagaggatgacagtgttcccatatgcattcactgcagtgctggctgtggaaggactggtgttatttgtgctattgattatacatggatgttgctaaaagatgggataattcctgagaacttcagtgttttcagtttgatccgggaaatgcggacacagaggccttcattagttcaaacgcaggaacaatatgaactggtctacaatgctgtattagaactatttaagagacagatggatgttatcagagataaacattctggaacagagagtcaagcaaagcattgtattcctgagaaaaatcacactctccaagcagactcttattctcctaatttaccaaaaagtaccacaaaagcagcaaaaatgatgaaccaacaaaggacaaaaatggaaatcaaagaatcttcttcctttgactttaggacttctgaaataagtgcaaaagaagagctagttttgcaccctgctaaatcaagcacttcttttgactttctggagctaaattacagttttgacaaaaatgctgacacaaccatgaaatggcagacaaaggcatttccaatagttggggagcctcttcagaagcatcaaagtttggatttgggctctcttttgtttgagggatgttctaattctaaacctgtaaatgcagcaggaagatattttaattcaaaggtgccaataacacggaccaaatcaactccttttgaattgatacagcagagagaaaccaaggaggtggacagcaaggaaaacttttcttatttggaatctcaaccacatgattcttgttttgtagagatgcaggctcaaaaagtaatgcatgtttcttcagcagaactgaattattcactgccatatgactctaaacaccaaatacgtaatgcctctaatgtaaagcaccatgactctagtgctcttggtgtatattcttacatacctttagtggaaaatccttatttttcatcatggcctccaagtggtaccagttctaagatgtctcttgatttacctgagaagcaagatggaactgtttttccttcttctctgttgccaacatcctctacatccctcttctcttattacaattcacatgattctttatcactgaattctccaaccaatatttcctcactattgaaccaggagtcagctgtactagcaactgctccaaggatagatgatgaaatcccccctccacttcctgtacggacacctgaatcatttattgtggttgaggaagctggagaattctcaccaaatgttcccaaatccttatcctcagctgtgaaggtaaaaattggaacatcactggaatggggtggaacatctgaaccaaagaaatttgatgactctgtgatacttagaccaagcaagagtgtaaaactccgaagtcctaaatcagaactacatcaagatcgttcttctcccccacctcctctcccagaaagaactctagagtccttctttcttgccgatgaagattgtatgcaggcccaatctatagaaacatattctactagctatcctgacaccatggaaaattcaacatcttcaaaacagacactgaagactcctggaaaaagtttcacaaggagtaagagtttgaaaattttgcgaaacatgaaaaagagtatctgtaattcttgcccaccaaacaagcctgcagaatctgttcagtcaaataactccagctcatttctgaattttggttttgcaaaccgtttttcaaaacccaaaggaccaaggaatccaccaccaacttggaatatttaataaaactccagatttataataatatgggctgcaagtacacctgcaaataaaactactagaatactgctagttaaaataagtgctctatatgcataatatcaaatatgaagatatgctaatgtgttaatagcttttaaaagaaaagcaaaatgccaataagtgccagttttgcattttcatatcatttgcattgagttgaaaactgcaaataaaagtttgtcacttgagcttatgtacagaatgctatatgagaaacacttttagaatggatttatttttcatttttgccagttatttttattttcttttacttttctacataaacataaacttcaaaaggtttgtaagatttggatctcaactaatttctacattgccagaatatactataaaaagttaaaaaaaaaacttactttgtgggttgcaatacaaactgctcttgacaatgactattccctgacagttatttttgcctaaatggagtataccttgtaaatcttcccaaatgttgtggaaaactggaatattaagaaaatgagaaattatatttattagaataaaatgtgcaaataatgacaattatttgaatgtaacaaggaattcaactgaaatcctgataagttttaaccaaagtcattaaattaccaattctagaaaagtaatcaatgaaatataatagctatcttttggtagcaaaagatataaattgtatatgtttatacaggatctttcagatcatgtgcaatttttatctaaccaatcagaaatactagtttaaaatgaatttctatatgaatatggatctgccataagaaaatctagttcaactctaattttatgtagtaaataaattggcaggtaattgtttttacaaagaatccacctgacttcccctaatgcattaaaaatatttttatttaaataactttatttataacttttagaaacatgtagtattgtttaaacatcatttgttcttcagtatttttcatttggaagtccaatagggcaaattgaatgaagtattattatctgtctcttgtagtacaatgtatccaacagacactcaataaactttttggttgttaaactgaaaaaaaaaaaaaaaaaaaaaaaaa

SEQ ID NO: 54 - protein, 807 aa, homo sapiens
MDQREILQKFLDEAQSKKITKEEFANEFLKLKRQSTKYKADKTYPTTVAEKPKNIKKNRYKDILPYDYSRVELSLITSDEDSSYINANFIKGVYGPKAYIATQGPLSTTLLDFWRMIWEYSVLIIVMACMEYEMGKKKCERYWAEPGEMQLEFGPFSVSCEAEKRKSDYIIRTLKVKFNSETRTIYQFHYKNWPDHDVPSSIDPILELIWDVRCYQEDDSVPICIHCSAGCGRTGVICAIDYTWMLLKDGIIPENFSVFSLIREMRTQRPSLVQTQEQYELVYNAVLELFKRQMDVIRDKHSGTESQAKHCIPEKNHTLQADSYSPNLPKSTTKAAKMMNQQRTKMEIKESSSFDFRTSEISAKEELVLHPAKSSTSFDFLELNYSFDKNADTTMKWQTKAFPIVGEPLQKHQSLDLGSLLFEGCSNSKPVNAAGRYFNSKVPITRTKSTPFELIQQRETKEVDSKENFSYLESQPHDSCFVEMQAQKVMHVSSAELNYSLPYDSKHQIRNASNVKHHDSSALGVYSYIPLVENPYFSSWPPSGTSSKMSLDLPEKQDGTVFPSSLLPTSSTSLFSYYNSHDSLSLNSPTNISSLLNQESAVLATAPRIDDEIPPPLPVRTPESFIVVEEAGEFSPNVPKSLSSAVKVKIGTSLEWGGTSEPKKFDDSVILRPSKSVKLRSPKSELHQDRSSPPPPLPERTLESFFLADEDCMQAQSIETYSTSYPDTMENSTSSKQTLKTPGKSFTRSKSLKILRNMKKSICNSCPPNKPAESVQSNNSSSFLNFGFANRFSKPKGPRNPPPTWNI

SEQ ID NO: 55 - DNA, 2234 bp, homo sapiens
aactggctccgattggctgtggtacagcaggtgccgcgtccggattgatcaaagccaggtgggcggggctgtcgcccagggtgactctcccgggaggcgcgtgcccaggctcagtagcattggggctggcgcgcgcggcgaatctcaacgctgcgccgtctgcgggcgcttccgggccaccagtttctctgctttccaccctggcgccccccagccctggctccccagctgcgctgccccgggcgtccacgccctgcgggcttagcgggttcagtgggctcaatctgcgcagcgccacctccatgttgaccaagcctctacaggggcctcccgcgccccccgggacccccacgccgccgccaggaggcaaggatcgggaagcgttcgaggccgagtatcgactcggccccctcctgggtaaggggggctttggcaccgtcttcgcaggacaccgcctcacagatcgactccaggtggccatcaaagtgattccccggaatcgtgtgctgggctggtcccccttgtcagactcagtcacatgcccactcgaagtcgcactgctatggaaagtgggtgcaggtggtgggcaccctggcgtgatccgcctgcttgactggtttgagacacaggagggcttcatgctggtcctcgagcggcctttgcccgcccaggatctctttgactatatcacagagaagggcccactgggtgaaggcccaagccgctgcttctttggccaagtagtggcagccatccagcactgccattcccgtggagttgtccatcgtgacatcaaggatgagaacatcctgatagacctacgccgtggctgtgccaaactcattgattttggttctggtgccctgcttcatgatgaaccctacactgactttgatgggacaagggtgtacagccccccagagtggatctctcgacaccagtaccatgcactcccggccactgtctggtcactgggcatcctcctctatgacatggtgtgtggggacattccctttgagagggaccaggagattctggaagctgagctccacttcccagcccatgtctccccagactgctgtgccctaatccgccggtgcctggcccccaaaccttcttcccgaccctcactggaagagatcctgctggacccctggatgcaaacaccagccgaggatgtacccctcaacccctccaaaggaggccctgcccctttggcctggtccttgctaccctaagcctggcctggcctggcctggcccccaatggtcagaagagccatcccatggccatgtcacagggatagatggacatttgttgacttggttttacaggtcattaccagtcattaaagtccagtattactaaggtaagggattgaggatcaggggttagaagacataaaccaagtctgcccagttcccttcccaatcctacaaaggagccttcctcccagaacctgtggtccctgattctggagggggaacttcttgcttctcattttgctaaggaagtttattttggtgaagttgttcccattctgagccccgggactcttattctgatgatgtgtcaccccacattggcacctcctactaccaccacacaaacttagttcatatgctcttacttgggcaagggtgctttccttccaataccccagtagcttttattttagtaaagggaccctttcccctagcctagggtcccatattgggtcaagctgcttacctgcctcagcccaggattctttattctgggggaggtaatgccctgttgttaccccaaggcttcttttttttttttttttttttgggtgaggggaccctactctgttatcccaagtgctcttattctggtgagaagaaccttacttccataatttgggaaggaatggaagatggacaccaccggacaccaccagacactaggatgggatggatggttttttgggggatgggctaggggaaataaggcttgctgtttgttctcctggggcgctccctccaacttttgcagattcttgcaacctcctcctgagccgggattgtccaattactaaaatgtaaataatcacgtattgtggggaggggagttccaagtgtgccctcctctcttctcctgcctggattatttaaaaagccatgtgtggaaacccactatttaataaaagtaatagaatcagaaaaaaaaaaaaaaaaaaaaaaaaaaaaaaaaaaaaaaaaaaaaaaaaa

SEQ ID NO: 56 - protein, 311 aa, homo sapiens
MLTKPLQGPPAPPGTPTPPPGGKDREAFEAEYRLGPLLGKGGFGTVFAGHRLTDRLQVAIKVIPRNRVLGWSPLSDSVTCPLEVALLWKVGAGGGHPGVIRLLDWFETQEGFMLVLERPLPAQDLFDYITEKGPLGEGPSRCFFGQVVAAIQHCHSRGVVHRDIKDENILIDLRRGCAKLIDFGSGALLHDEPYTDFDGTRVYSPPEWISRHQYHALPATVWSLGILLYDMVCGDIPFERDQEILEAELHFPAHVSPDCCALIRRCLAPKPSSRPSLEEILLDPWMQTPAEDVPLNPSKGGPAPLAWSLLP

SEQ ID NO: 57 - DNA, 3316 bp, homo sapiens
atctgctcctgtaagcccagagaggcccagggacaacttccactttattctggatgttttcacttttgggacatcctgttctgagtcaagattcctccttctgaacatgggactttccagaaggaccacagctcctcccgtgcatccactcggcctgggaggttctggattttggctgtcgagggagtttgcctgcctctccagagaaagatggtcatgaggcccctgtggagtctgcttctctgggaagccctacttcccattacagttactggtgcccaagtgctgagcaaagtcgggggctcggtgctgctggtggcagcgcgtccccctggcttccaagtccgtgaggctatctggcgatctctctggccttcagaagagctcctggccacgtttttccgaggctccctggagactctgtaccattcccgcttcctgggccgagcccagctacacagcaacctcagcctggagctcgggccgctggagtctggagacagcggcaacttctccgtgttgatggtggacacaaggggccagccctggacccagaccctccagctcaaggtgtacgatgcagtgcccaggcccgtggtacaagtgttcattgctgtagaaagggatgctcagccctccaagacctgccaggttttcttgtcctgttgggcccccaacatcagcgaaataacctatagctggcgacgggagacaaccatggactttggtatggaaccacacagcctcttcacagacggacaggtgctgagcatttccctgggaccaggagacagagatgtggcctattcctgcattgtctccaaccctgtcagctgggacttggccacagtcacgccctgggatagctgtcatcatgaggcagcaccagggaaggcctcctacaaagatgtgctgctggtggtggtgcctgtctcgctgctcctgatgctggttactctcttctctgcctggcactggtgcccctgctcagggaaaaagaaaaaggatgtccatgctgacagagtgggtccagagacagagaacccccttgtgcaggatctgccataaaggacaatatgaactgatgcctggactatcagtaaccccactgcacaggcacacgatgctctgggacataactggtgcctggaaatcaccatggtcctcatatctcccatgggaatcctgtcctgcctcgaaggagcagcctgggcagccatcacaccacgaggacaggaagcaccagcacgtttcacacctcccccttccctctcccatcttctcatatcctggctcttctctgggcaagatgagccaagcagaacattccatccaggacactggaagttctccaggatccagatccatggggacattaatagtccaaggcattccctcccccaccactattcataaagtattaaccaactggcaccaaggaattgcctccagcctgagtcctaggctctaaaagatattacatatttgaactaatagaggaactctgagtcacccatgccagcatcagcttcagccccagaccctgcagtttgagatctgatgcttcctgagggccaaggcattgctgtaagaaaaggtctagaaataggtgaaagtgagaggtgggggacaggggtttctctttctggcctaaggactttcaggtaatcagagttcatgggccctcaaaggtaaattgcagttgtagacaccgaggatggttgacaacccatggttgagatgggcaccgttttgcaggaaacaccatattaatagacatcctcaccatctccatccgctctcacgcctcctgcaggatctgggagtgagggtggagagtctttcctcacgctccagcacagtggccaggaaaagaaatactgaatttgccccagccaacaggacgttcttgcacaacttcaagaaaagcagctcagctcaggatgagtcttcctgcctgaaactgagagagtgaagaaccataaaacgctatgcagaaggaacattatggagagaaagggtactgaggcactctagaatctgccacattcattttcaaatgcaaatgcagaagacttaccttagttcaaggggaggggacaaagaccccacagcccaacagcaggactgtagaggtcactctgactccatcaaactttttattgtggccatcttaggaaaatacattctgcccctgaatgattctgtctagaaaagctctggagtattgatcactactggaaaaacacttaaggagctaaacttaccttcggggattattagctgataaggttcacagtttctctcacccaggtgtaactggattttttctggggcctcaatccagtcttgataacagcgaggaaagaggtattgaagaaacaggggtgggtttgaagtactattttcccagggtggcttcaatctccccacctaggatgtcagccctgtccaaggaccttccctcttctccccagttcctgggcaatcacttcaccttggacaaaggatcagcacagctggcctccagatccacatcaccactcttccactcgattgttcccagatcctccctgcctggcctgctcagaggttccctgttggtaacctggctttatcaaattctcatccctttcccacacccacttctctcctatcaccttcccccaagattacctgaacagggtccatggccactcaacctgtcagcttgcaccatccccacctgccacctacagtcaggccacatgcctggtcactgaatcatgcaaaactggcctcagtccctaaaaatgatgtggaaaggaaagcccaggatctgacaatgagccctggtggatttgtggggaaaaaatacacagcactccccacctttctttcgttcatctccagggccccacctcagatcaaagcagctctggatgagatgggacctgcagctctccctccacaaggtgactcttagcaacctcatttcgacagtggtttgtagcgtggtgcaccagggccttgttgaacagatccacactgctctaataaagttcccatccttaatgactcacttgtcaactagtggactaattaaccctccaccaaaaaaacacaaagtgcttctgtgagaccaattttgtgctaatgagcattgagactgatgctttgtaagtcacaccacaacaaatattgattgagggcgctgcatgtgctgggtacatttcttggcacttgggaatcagtagtcaagcgaaacccttgcctttgagagtttatggtctggataatataaataaacaagtaagcataaaaaaaaaaaaaaaaa

SEQ ID NO: 58 - protein, 285 aa, homo sapiens
MVMRPLWSLLLWEALLPITVTGAQVLSKVGGSVLLVAARPPGFQVREAIWRSLWPSEELLATFFRGSLETLYHSRFLGRAQLHSNLSLELGPLESGDSGNFSVLMVDTRGQPWTQTLQLKVYDAVPRPVVQVFIAVERDAQPSKTCQVFLSCWAPNISEITYSWRRETTMDFGMEPHSLFTDGQVLSISLGPGDRDVAYSCIVSNPVSWDLATVTPWDSCHHEAAPGKASYKDVLLVVVPVSLLLMLVTLFSAWHWCPCSGKKKKDVHADRVGPETENPLVQDLP

SEQ ID NO: 59 - DNA, 5769 bp, homo sapiens
gagggaggagagttcacttttacttcagtgtcagcgcgcggcggccgtggctggctctggcgagagagcaccgagggagtgggtcgcagatcttcgggcggctaggggaaatcggcgagaggcgggatccgagcgcgccggcggggcgcagagcccgcgagcctggccagcgagggtagccgcggggggcgcgccccgggcgggcccccggagacgcgcaggatgccacacgaagagctgccgtcgctgcagagaccccgctatggctctattgtggacgatgaaaggctctctgcagaggagatggatgagaggaggcggcagaacattgcttatgaatatctgtgccacttagaggaagccaaaaggtggatggaagtttgcttagttgaagaattgccaccaaccactgaattggaagaagggctccggaatggagtttaccttgcaaagttagccaagttctttgccccgaaaatggtatcagagaaaaagatctatgatgtggaacaaacacgttataagaagtctggccttcattttcgacacacagataataccgtccagtggttaagagcgatggagtctattggtctacccaagatattttatccagaaacaacagatgtctatgatcggaaaaacataccaagaatgatatattgcattcacgcactgagtttgtatctgttcaaactaggaatagcaccccagatccaggatttgttgggcaaagtagacttcacagaggaggaaatcagtaatatgagaaaagaacttgagaaatatggaatacagatgccatctttcagcaaaataggtggtattctggccaatgaactgtccgtggatgaagctgcattacatgctgcagttatagccattaatgaagcagttgaaaaaggaatagcagagcaaaccgttgtaacactaagaaacccaaatgcggttttaactttagtggatgacaaccttgcaccagaatatcagaaagaactctgggatgccaaaaagaaaaaagaggaaaatgcaagactgaagaatagctgtatttcagaagaagaaagagatgcttatgaagaactgctgacacaagcagaaatccaaggcaatattaataaagtcaacaggcaggctgcagtggaccatatcaatgctgtcattccggaaggtgaccccgagaatacgctgcttgcactgaagaaaccagaggcccagctgcctgctgtttatccctttgctgctgccatgtatcagaacgaacttttcaacctccagaaacagaacaccatgaactacttggcccacgaggagcttttgattgctgtggaaatgttgtctgctgttgctttactaaaccaggccttggaaagcaacgatcttgtgtctgtgcagaatcaactcagaagccccgcaataggcttaaacaatctggacaaggcatatgtggaacgttatgcaaacacactactctctgttaaactagaagttttatcccaagggcaagataacttaagctggaatgaaattcagaattgtattgatatggttaatgctcaaattcaagaagaaaatgaccgagttgtagctgtagggtacatcaatgaagctattgatgaagggaatcctttgaggactttagaaactttgctcctacctactgcgaatattagtgatgtggacccagcccatgcccagcactaccaggatgttttataccatgctaaatcacagaaactcggagactctgagagtgtttccaaagtgctttggctggatgagatacagcaagccgtcgatgatgccaacgtggacgaggacagagcaaaacaatgggttactctggtggttgatgttaatcagtgtttggaaggaaaaaaatcaagtgatattttgtctgtattgaagtcttccacttctaatgcaaatgacataatcccggagtgtgctgacaaatactatgatgcccttgtgaaggcaaaagagctcaaatctgaaagagtgtctagtgacggttcatggctcaaactcaacctgcacaaaaaatatgactactattacaacactgattcaaaagagagttcctgggtcacacctgaatcatgcttgtataaagaatcatggctcacaggaaaagaaatcgaggacattattgaggaagtcacagtaggttacattcgtgagaatatatggtctgcttcagaagagttgcttcttcgctttcaagccacaagctcaggacccatccttagggaagagtttgaagctagaaaatcatttttgcatgaacaagaagagaatgtggtcaaaatacaggctttttggaaaggatataaacaacggaaggagtatatgcacaggcggcaaacgttcattgataatactgattctattgtgaagattcagtcctggttccgaatggcaactgcaagaaagagctatctttcaagactacagtatttcagagatcataataatgaaattgtgaaaatacagtcactgttgagagcgaacaaagctagagatgactacaaaacattggttggctctgaaaacccaccattaacagtaattcgcaaatttgtatacctgctggaccaaagtgatttggatttccaggaggaactagaggttgcacgattaagggaagaagtagtgaccaagatcagggccaatcaacagctggaaaaagacctgaacctgatggacatcaagattggactgctggtgaagaacaggatcacactagaggatgtaatttcacacagtaaaaagctgaacaagaaaaaaggaggagaaatggaaatactgaataacaccgacaaccaaggaataaaaagtttgagtaaggagaggagaaaaacactagaaacatatcagcagctgttttaccttttacagaccaaccctttatacttggctaagctgattttccagatgccacagaacaagtccactaaatttatggatactgttattttcacactatataattatgcctctaatcagcgagaagaatatctacttctcaagctttttaaaactgctctggaggaagaaataaaatcaaaagtggaccaggtacaggacatagttactggtaaccctacagtcatcaagatggtcgtcagcttcaatagaggtgcccggggacagaacaccctgcgccaactcctggctccagtggtaaaagagatcatcgacgacaagtcgctgattatcaacacaaaccctgtagaggtgtacaaggcttgggtgaaccaactagaaacacagactggagaggccagcaagttgccttatgatgtgaccacagaacaagctctaacatacccagaagtgaaaaataaactggaggcttccattgagaacctgagaagggtcaccgacaaagtcctgaattctatcatttcttcccttgatctactgccttatggattgaggtatatagccaaagtactgaagaattcgatccatgagaaattccccgatgcaacagaagatgagctattaaagattgttggaaacctcctgtactatcggtacatgaatccagccattgtagctccagatggctttgatatcatcgacatgacagctggaggtcagataaattctgaccaaaggagaaacttaggatcagtggccaaggttcttcagcacgcagcctccaacaagctgtttgaaggagaaaatgagcatctctcatctatgaacaattatttatcagagacgtatcaggaattcaggaaatatttcaaagaagcatgtaatgtccctgagccagaagagaagtttaatatggacaaatacacagacctggtgacagtcagcaaaccagtcatttatatttcaattgaagaaatcatcagcacacactcactcctgttggaacaccaggatgcaattgcccctgagaaaaatgacttactgagtgaattgctggggtcgctgggagaggtgccaaccgtggaatcttttcttggggaaggagcagttgaccccaatgaccctaacaaggcaaatacactaagtcagctttcaaagaccgagatttctcttgtcttgacaagcaaatatgacatagaggacggtgaagctatagatagccgaagcctcatgataaagaccaagaagctgataattgatgtgatccggaaccagccagggaacacattgacagaaatcttagagacaccagcaactgcgcaacaggaggtagaccatgccacggacatggtgagccgtgcaatgatagattccaggactccagaagaaatgaagcatagccaatctatgattgaagatgcacagctgcctcttgagcagaagaagaggaaaatccagaggaatcttcggacgttggaacagactggacacgtgtcatccgaaaataaataccaagacattctcaatgagattgccaaggatattcgaaatcaaagaatctatcgtaagcttcgaaaagctgaattggcaaaacttcagcagaccctgaatgcacttaacaagaaggcagcattttatgaagagcaaatcaattattatgacacctacataaagacttgtttagacaacttaaaaagaaaaaatactcggagatcaattaaactagatggaaaaggagaacccaaaggggcgaagagagcgaagccagtgaagtacactgcagcaaagctgcatgagaaaggtgtcctgctagatatagatgatcttcaaacaaaccagtttaagaatgttacatttgatatcatagctactgaagatgtaggcattttcgatgtaagatcaaaattccttggtgttgagatggaaaaggtgcaactcaatattcaggatttacttcagatgcaatatgaaggagtagctgtaatgaaaatgtttgataaggttaaagtgaatgtaaaccttctcatatacctgctgaacaagaagttctatggaaagtgaagtgcctacagaaatttcttggattctgtatcatctggattaggaaatgaatttgtttaatatttttgtttttaaacatgattgaaatcactgcttataaatgtgtgatttttttaaaacgaccaaaactgttctgaagaatgtacccaggtgcctttttgctaatttgatactataatagaatgagacataaaatgaattaatggaaacatatccacactgtactgtgatataggtactctgatttaaaactttggacatcctgtgatctgttttaaagttggggggtgggaaatttagctgactagggacaaacatgtaaacctattttcctatgaaaaaaattttaaatgtcccacttgaataacgtaattcttcatagtttttttaatctatggataaatggaaacctaattatttgtaatgaattatttagacagttctaagccctgtcttctgggagttatcaattttaaagagaacttttgtgcaattcaaatgaagtttttataagtaattgaaaatgacaacacaataacactttctgtataaaagtatatattttatgtgatttattcctactaaatgaaagtgcactactgcctcatgtaaagactcttgcacgcagagcctttaagtgactaaggaacaacatagatagtgagcatagtccccacctccacccctcacaatttatttgaatacttcaattgtgcctctcaattttttgtaatgctaaaaaatcagtatctagatggtttttaaatgtattctctggaaattgttttatgtaaaataaatgttacttaattccattaa

SEQ ID NO: 60 - protein, 1575 aa, homo sapiens
MPHEELPSLQRPRYGSIVDDERLSAEEMDERRRQNIAYEYLCHLEEAKRWMEVCLVEELPPTTELEEGLRNGVYLAKLAKFFAPKMVSEKKIYDVEQTRYKKSGLHFRHTDNTVQWLRAMESIGLPKIFYPETTDVYDRKNIPRMIYCIHALSLYLFKLGIAPQIQDLLGKVDFTEEEISNMRKELEKYGIQMPSFSKIGGILANELSVDEAALHAAVIAINEAVEKGIAEQTVVTLRNPNAVLTLVDDNLAPEYQKELWDAKKKKEENARLKNSCISEEERDAYEELLTQAEIQGNINKVNRQAAVDHINAVIPEGDPENTLLALKKPEAQLPAVYPFAAAMYQNELFNLQKQNTMNYLAHEELLIAVEMLSAVALLNQALESNDLVSVQNQLRSPAIGLNNLDKAYVERYANTLLSVKLEVLSQGQDNLSWNEIQNCIDMVNAQIQEENDRVVAVGYINEAIDEGNPLRTLETLLLPTANISDVDPAHAQHYQDVLYHAKSQKLGDSESVSKVLWLDEIQQAVDDANVDEDRAKQWVTLVVDVNQCLEGKKSSDILSVLKSSTSNANDIIPECADKYYDALVKAKELKSERVSSDGSWLKLNLHKKYDYYYNTDSKESSWVTPESCLYKESWLTGKEIEDIIEEVTVGYIRENIWSASEELLLRFQATSSGPILREEFEARKSFLHEQEENVVKIQAFWKGYKQRKEYMHRRQTFIDNTDSIVKIQSWFRMATARKSYLSRLQYFRDHNNEIVKIQSLLRANKARDDYKTLVGSENPPLTVIRKFVYLLDQSDLDFQEELEVARLREEVVTKIRANQQLEKDLNLMDIKIGLLVKNRITLEDVISHSKKLNKKKGGEMEILNNTDNQGIKSLSKERRKTLETYQQLFYLLQTNPLYLAKLIFQMPQNKSTKFMDTVIFTLYNYASNQREEYLLLKLFKTALEEEIKSKVDQVQDIVTGNPTVIKMVVSFNRGARGQNTLRQLLAPVVKEIIDDKSLIINTNPVEVYKAWVNQLETQTGEASKLPYDVTTEQALTYPEVKNKLEASIENLRRVTDKVLNSIISSLDLLPYGLRYIAKVLKNSIHEKFPDATEDELLKIVGNLLYYRYMNPAIVAPDGFDIIDMTAGGQINSDQRRNLGSVAKVLQHAASNKLFEGENEHLSSMNNYLSETYQEFRKYFKEACNVPEPEEKFNMDKYTDLVTVSKPVIYISIEEIISTHSLLLEHQDAIAPEKNDLLSELLGSLGEVPTVESFLGEGAVDPNDPNKANTLSQLSKTEISLVLTSKYDIEDGEAIDSRSLMIKTKKLIIDVIRNQPGNTLTEILETPATAQQEVDHATDMVSRAMIDSRTPEEMKHSQSMIEDAQLPLEQKKRKIQRNLRTLEQTGHVSSENKYQDILNEIAKDIRNQRIYRKLRKAELAKLQQTLNALNKKAAFYEEQINYYDTYIKTCLDNLKRKNTRRSIKLDGKGEPKGAKRAKPVKYTAAKLHEKGVLLDIDDLQTNQFKNVTFDIIATEDVGIFDVRSKFLGVEMEKVQLNIQDLLQMQYEGVAVMKMFDKVKVNVNLLIYLLNKKFYGK

SEQ ID NO: 61 - DNA, 4803 bp, homo sapiens
gactcgggagttgccggcgcttcccggcggtggcggcgtctctggccggccttggtgcggcgagccgagcgaggcagctctgagccgcgcggaaatctggcattttttaaagtttgcgccccacaaagaggaaatattccaaaggtactcaggatgtaaaaggggagatcttcacagatgcctccgtggatggcatggcaatccatccatcaatgagaagaccatgatttcttttaattttctgtgtgtttccacattccccagtgagaattcttccacctttttttgtgccatgggaaaaacctgaagggcaggcagagctgctcccgaacttgtgaccttctctgaggttgcagcggctcttgtagaacatgactctgggacatcacttccttttgttttctttcggagctgaaccaaagaatgtgcaccctctttctctagtgctgtggtgtctgcttatttttgtatttgtgctttccatccatcttctgtgatcacaaggcattcttaaggttttctagcacgacttgcggacatccagactcgtggggggcccacccatggctcggtaagccagcagcccagggcactggcactaccatgaggcactgcattaattgctgcatacagctgttacccgacggcgcacacaagcagcaggtcaactgccaagggggcccccatcacggtcaccaggcgtgccccacgtgcaaaggagaaaacaaaattctgtttcgtgtggacagtaagcagatgaacttgcttgctgttctcgaagtgaggactgaagggaacgaaaactggggtgggtttttgcgcttcaaaaaggggaagcgatgtagcctcgtttttggactgataataatgaccttggtaatggcttcttacatcctttctggggcccaccaagagcttctgatctcatcacctttccattacggaggcttccccagcaaccccagcttgatggacagcgaaaacccaagtgacacaaaggagcatcaccaccaatcctctgtaaataatatttcatacatgaaggactatccaagcattaaattaattatcaacagcatcacaactaggattgagttcacgaccagacagctcccagacttagaagaccttaagaagcaggagttgcatatgttttcagtcatccccaacaaattccttccaaacagtaagagcccctgttggtacgaggagttctcggggcagaacaccaccgacccctacctcaccaactcctacgtgctctactccaagcgcttccgctccaccttcgacgccctgcgcaaggccttctggggccacctggcgcacgcgcacgggaagcacttccgcctgcgctgcctgccgcacttctacatcatagggcagcccaagtgcgggaccacagacctctatgaccgcctgcggctgcaccctgaggtcaagttctccgccatcaaggagccacactggtggacccggaagcgctttggaatcgtccgcctaagagatgggctgcgagaccgctatcccgtggaagattatctggacctctttgacctggccgcacaccagatccatcaaggactgcaggccagctctgcaaaggagcagagcaagatgaatacaatcattatcggggaggccagtgcctccacgatgtgggataataatgcctggacgttcttctacgacaacagcacggatggcgagccaccgtttctgacgcaggacttcatccacgcctttcagccaaatgccagactgattgtcatgctcagggaccctgtggagaggttgtactcagactatctctactttgcaagttcgaataaatccgcggacgacttccatgagaaagtgacagaagcactgcagctgtttgaaaattgcatgcttgattattcactgcgcgcctgcgtctacaacaacaccctcaacaacgccatgcctgtgaggctccaggttgggctctatgctgtgtaccttctggactggctcagcgtttttgacaagcaacagtttctcattcttcgcctggaagatcatgcatccaacgtcaagtacaccatgcacaaggtcttccagtttctgaacctagggcccttaagtgagaagcaggaggctttgatgaccaagagccccgcatccaatgcacggcgtcccgaggaccggaacctggggcccatgtggcccatcacacagaagattctgcgggatttctacaggcccttcaacgctaggctggcgcaggtcctcgcggatgaggcgtttgcgtggaagacgacgtgagagctgaattgttgctgcacgtgctgggcccgccaatgccgtcatcatcaggattttacaaatctctttgcggggaactgtttcactcatggtatggaaaaccccaggactctgccactctaggcacacatgaattataaccattttggaatttccttcgtgatgttcgagagctcagcaatggacccctcacagagctcctctatccgaggccattggagaccccagtttctcaagaattcagctctgctctgagcgtcctggagcttggggatgcagccagctggcctgcactgggtgtggagagaacacctagggaaggcagcctggccctgcccgcctccgccttctggagagcctctgggttctgagtcagcaagccagaggtcatgccacaggcctggctggaacttacacttcacgttccctttttttccccctagagatggggtctcgccgtgttgcacagactgtctgtattcaatggctatcttcacaggtgtgatcataccacattcacttctgaaacactcttgttgcgatcgctaacctcactgggacagagaaccgcagtctttcgagaatggaggctcttcattttttttttctcctttactccaaactcagccctccagtttcttcagatgtaaaccctgttaacgtcactgtttccaaaaggaaaaaaataagtcagtttttggcagcaccttcatctttctgacctcctcctattctgtccttgtggacttatgtttaacatagaaaatgaatgcgtttaaaacaaaaccactttctgcatttaaccagtcctggctctctctctgctgcctcttcatacgttttctcaagaacttcagtttataattggaagagaaatttttgctgttaatgccagaatgagcaacctcaaggaattgaacacttcttggaaaatctaggtaattcaagccctcatcaggtttacaagatcatcagagaaacagaggattttaatttttagttctggccggctacaggctccatttctctgccttcccattggaaatagtttatttccacattctccactgcgtgtggtcaaagttcctcacccagcaagggactatagatactcgtgtcccaattccaaaacacaatgcacaagctgaacttgggctgaacgtggcgtgttgagatttggaatgaggtttctaagagccgtgttcttcatggaattttccaggccacttggcagcttggtttaccgatggatgggctagagatcttgtcgtttcttggaagtcacagggaagattgaagagaacgcttgagcatccttggcaacagcccaggtgggacctggatgaagctttgcactcaagtattgtcaagggaagcttcctgtgaaccaaagttctcaggccaaggtctcgcccaccaaagccagaaagtgcaagcacccgtctacccagctctaacttgtatgtgtgagacagaccaggcttcgggggtaggaggatctgcagttgttcagccgtctttctgctggtgttgtctttctgccatcagagaagggacacacagcccgttcgaaggtgtgcagagggctctgagcgccaggatggccagggctgtttttgctactgaaggagcgtgtgtcctgaactcccacttgcagggacagtccccaccttctctatagccggcactgggagcagccgccagcagggaaatctggcctgagcacaaggatgctttagggagagatcacttcagtgtgtgtgtatatttatttgcagtacagtgcgcgcgtgtgtgtgtgtgtacgcgcacgtgtgggtgagtgcgtcttctgagtgggttctgttcagttgctaatgaggctcctccgctctggacacaacccttttatagattaatttctctgccaattaacttgtcattttcagtacatattttactattccacaccaaccataattacaacaagggatttttcttatgcactcctatgcatgtgaataacatgtggtgtaattctgcttcttacagaagtattactgaaggtattatttccaatattatttggtttattatgcggatcttttttatatatgcagtcccatcccttctgtgccactcaatgccatccagacatggtttttccctccaggggcctttctctccagagggcacttcggctgcctctgcttcctctcattcgaggcccggctcttgctgacagaataggttccgttctgggcggtggttctcgagcctgccattcaaaaccaaagcaaattggagcatttctcacaacatggtattgaagttcctttttgttctcaaaagttgtgaccgtgttaaattgtactcccttagtcctgtaaggtatgttaagtgaatcgcagttacgctgtacttttattaatatttaacataattaaagatggacccataagagtgacgcctgtggagcgcgtgctcttcctctgcagccaagcaaaaaaaaaaaaaaaaaaaaaaaaaaaaaaa

SEQ ID NO: 62 - protein, 561 aa, homo sapiens
MRHCINCCIQLLPDGAHKQQVNCQGGPHHGHQACPTCKGENKILFRVDSKQMNLLAVLEVRTEGNENWGGFLRFKKGKRCSLVFGLIIMTLVMASYILSGAHQELLISSPFHYGGFPSNPSLMDSENPSDTKEHHHQSSVNNISYMKDYPSIKLIINSITTRIEFTTRQLPDLEDLKKQELHMFSVIPNKFLPNSKSPCWYEEFSGQNTTDPYLTNSYVLYSKRFRSTFDALRKAFWGHLAHAHGKHFRLRCLPHFYIIGQPKCGTTDLYDRLRLHPEVKFSAIKEPHWWTRKRFGIVRLRDGLRDRYPVEDYLDLFDLAAHQIHQGLQASSAKEQSKMNTIIIGEASASTMWDNNAWTFFYDNSTDGEPPFLTQDFIHAFQPNARLIVMLRDPVERLYSDYLYFASSNKSADDFHEKVTEALQLFENCMLDYSLRACVYNNTLNNAMPVRLQVGLYAVYLLDWLSVFDKQQFLILRLEDHASNVKYTMHKVFQFLNLGPLSEKQEALMTKSPASNARRPEDRNLGPMWPITQKILRDFYRPFNARLAQVLADEAFAWKTT

SEQ ID NO: 63 - DNA, 1879 bp, homo sapiens
agttccaagtttggagcttttagctgccagccctggcccatcatgtagctgcagcacagccttccctaacgttgcaactgggggaaaaatcactttccagtctgttttgcaaggtgtgcatttccatcttgattccctgaaagtccatctgctgcatcggtcaagagaaactccacttgcatgaagattgcacgcctgcagcttgcatctttgttgcaaaactagctacagaagagaagcaaggcaaagtcttttgtgctcccctcccccatcaaaggaaaggggaaaatgtctcagtcgaaaggcaagaagcgaaaccctggccttaaaattccaaaagaagcatttgaacaacctcagaccagttccacaccacctcgagatttagactccaaggcttgcatttctattggaaatcagaactttgaggtgaaggcagatgacctggagcctataatggaactgggacgaggtgcgtacggggtggtggagaagatgcggcacgtgcccagcgggcagatcatggcagtgaagcggatccgagccacagtaaatagccaggaacagaaacggctactgatggatttggatatttccatgaggacggtggactgtccattcactgtcaccttttatggcgcactgtttcgggagggtgatgtgtggatctgcatggagctcatggatacatcactagataaattctacaaacaagttattgataaaggccagacaattccagaggacatcttagggaaaatagcagtttctattgtaaaagcattagaacatttacatagtaagctgtctgtcattcacagagacgtcaagccttctaatgtactcatcaatgctctcggtcaagtgaagatgtgcgattttggaatcagtggctacttggtggactctgttgctaaaacaattgatgcaggttgcaaaccatacatggcccctgaaagaataaacccagagctcaaccagaagggatacagtgtgaagtctgacatttggagtctgggcatcacgatgattgagttggccatccttcgatttccctatgattcatggggaactccatttcagcagctcaaacaggtggtagaggagccatcgccacaactcccagcagacaagttctctgcagagtttgttgactttacctcacagtgcttaaagaagaattccaaagaacggcctacatacccagagctaatgcaacatccatttttcaccctacatgaatccaaaggaacagatgtggcatcttttgtaaaactgattcttggagactaaaaagcagtggacttaatcggttgaccctactgtggattggtgggtttcggggtgaagcaagttcactacagcatcaatagaaagtcatctttgagataatttaaccctgcctctcagagggttttctctcccaattttctttttactccccctcttaagggggccttggaatctatagtatagaatgaactgtctagatggatgaattatgataaaggcttaggacttcaaaaggtgattaaatatttaatgatgtgtcatatgagtcctcaagcttctcagacttctcttattctttacaaaatgaatgcattggccctgacaaaaaggtgctacggtagtgatgaaattataagtagatttgtagtttgtcccatttattattttaatatttatgtttaagtgcttggttgaaaagattccattttatacaagaagggagattcaaaaaaaaaatataaggttgggttagcaatatttatagggcttttattttttaagttcaattgtgtctgtggtccagaagaaattatttaatatgcatctttgagaatattataaaaatatcaaaaaggaaaaaaaaaaa

SEQ ID NO: 64 - protein, 334 aa, homo sapiens
MSQSKGKKRNPGLKIPKEAFEQPQTSSTPPRDLDSKACISIGNQNFEVKADDLEPIMELGRGAYGVVEKMRHVPSGQIMAVKRIRATVNSQEQKRLLMDLDISMRTVDCPFTVTFYGALFREGDVWICMELMDTSLDKFYKQVIDKGQTIPEDILGKIAVSIVKALEHLHSKLSVIHRDVKPSNVLINALGQVKMCDFGISGYLVDSVAKTIDAGCKPYMAPERINPELNQKGYSVKSDIWSLGITMIELAILRFPYDSWGTPFQQLKQVVEEPSPQLPADKFSAEFVDFTSQCLKKNSKERPTYPELMQHPFFTLHESKGTDVASFVKLILGD

SEQ ID NO: 65 - DNA, 2707 bp, homo sapiens
catctttgagcaagatgggtctctaccgcatccgcgtgtccactggggcctcgctctatgccggttccaacaaccaggtgcagctgtggctggtcggccagcacggggaggcggcgctcgggaagcgactgtggcccgcacggggcaaggagacagaactcaaggtggaagtaccggagtatctggggccgctgctgtttgtgaaactgcgcaaacggcacctccttaaggacgacgcctggttctgcaactggatctctgtgcagggccccggagccggggacgaggtcaggttcccttgttaccgctgggtggagggcaacggcgtcctgagcctgcctgaaggcaccggccgcactgtgggcgaggaccctcagggcctgttccagaaacaccgggaagaagagctggaagagagaaggaagttgtaccggtggggaaactggaaggacgggttaattctgaatatggctggggccaaactatatgacctccctgtggatgagcgatttctggaagacaagagagttgactttgaggtttcgctggccaaggggctggccgacctcgctatcaaagactctctaaatgttctgacttgctggaaggatctagatgacttcaaccggattttctggtgtggtcagagcaagctggctgagcgcgtgcgggactcctggaaggaagatgccttatttgggtaccagtttcttaatggcgccaaccccgtggtgctgaggcgctctgctcaccttcctgctcgcctagtgttccctccaggcatggaggaactgcaggcccagctggagaaggagctggagggaggcacactgttcgaagctgacttctccctgctggatgggatcaaggccaacgtcattctctgtagccagcagcacctggctgcccctctagtcatgctgaaattgcagcctgatgggaaactcttgcccatggtcatccagctccagctgccccgcacaggatccccaccacctccccttttcttgcctacggatcccccaatggcctggcttctggccaaatgctgggtgcgcagctctgacttccagctccatgagctgcagtctcatcttctgaggggacacttgatggctgaggtcattgttgtggccaccatgaggtgcctgccgtcgatacatcctatcttcaagcttataattccccacctgcgatacaccctggaaattaacgtccgggccaggactgggctggtctctgacatgggaattttcgaccagataatgagcactggtgggggaggccacgtgcagctgctcaagcaagctggagccttcctaacctacagctccttctgtccccctgatgacttggccgaccgggggctcctgggagtgaagtcttccttctatgcccaagatgcgctgcggctctgggaaatcatctatcggtatgtggaaggaatcgtgagtctccactataagacagacgtggctgtgaaagacgacccagagctgcagacctggtgtcgagagatcactgaaatcgggctgcaaggggcccaggaccgagggtttcctgtctctttacaggctcgggaccaggtttgccactttgtcaccatgtgtatcttcacctgcaccggccaacacgcctctgtgcacctgggccagctggactggtactcttgggtgcctaatgcaccctgcacgatgcggctgcccccgccaaccaccaaggatgcaacgctggagacagtgatggcgacactgcccaacttccaccaggcttctctccagatgtccatcacttggcagctgggcagacgccagcccgttatggtggctgtgggccagcatgaggaggagtatttttcgggccctgagcctaaggctgtgctgaagaagttcagggaggagctggctgccctggataaggaaattgagatccggaatgcaaagctggacatgccctacgagtacctgcggcccagcgtggtggaaaacagtgtggccatctaagcgtcgccaccctttggttatttcagcccccatcacccaagccacaagctgaccccttcgtggttatagccctgccctcccaagtcccaccctcttcccatgtcccaccctccctagaggggcaccttttcatggtctctgcacccagtgaacacattttactctagaggcatcacctgggaccttactcctctttccttccttcctcctttcctatcttccttcctctctctcttcctctttcttcattcagatctatatggcaaatagccacaattatataaatcatttcaagactagaatagggggatataatacatattactccacaccttttatgaatcaaatatgatttttttgttgttgttaagacagagtctcactttgacacccaggctggagtgcagtggtgccatcaccacggctcactgcagcctcagcgtcctgggctcaaatgatcctcccacctcagcctcctgagtagctgggactacaggctcatgccatcatgcccagctaatatttttttattttcgtggagacggggcctcactatgttgcctaggctggaaataggattttgaacccaaattgagtttaacaataataaaaagttgttttacgctaaagatggaaaagaactaggactgaactattttaaataaaatattggcaaaagaaaaaaaaaaaaaaaaaaaaaaaaa

SEQ ID NO: 66 - protein, 662 aa, homo sapiens
MGLYRIRVSTGASLYAGSNNQVQLWLVGQHGEAALGKRLWPARGKETELKVEVPEYLGPLLFVKLRKRHLLKDDAWFCNWISVQGPGAGDEVRFPCYRWVEGNGVLSLPEGTGRTVGEDPQGLFQKHREEELEERRKLYRWGNWKDGLILNMAGAKLYDLPVDERFLEDKRVDFEVSLAKGLADLAIKDSLNVLTCWKDLDDFNRIFWCGQSKLAERVRDSWKEDALFGYQFLNGANPVVLRRSAHLPARLVFPPGMEELQAQLEKELEGGTLFEADFSLLDGIKANVILCSQQHLAAPLVMLKLQPDGKLLPMVIQLQLPRTGSPPPPLFLPTDPPMAWLLAKCWVRSSDFQLHELQSHLLRGHLMAEVIVVATMRCLPSIHPIFKLIIPHLRYTLEINVRARTGLVSDMGIFDQIMSTGGGGHVQLLKQAGAFLTYSSFCPPDDLADRGLLGVKSSFYAQDALRLWEIIYRYVEGIVSLHYKTDVAVKDDPELQTWCREITEIGLQGAQDRGFPVSLQARDQVCHFVTMCIFTCTGQHASVHLGQLDWYSWVPNAPCTMRLPPPTTKDATLETVMATLPNFHQASLQMSITWQLGRRQPVMVAVGQHEEEYFSGPEPKAVLKKFREELAALDKEIEIRNAKLDMPYEYLRPSVVENSVAI

SEQ ID NO: 67 - DNA, 11023 bp, homo sapiens
gttattaactgtaagactgtttgaattgtcaggtctttgtggtgagctgaattctgcatggcagtgcttactgtgcagaaaggttgcaatgcctcactttgccttaatccatgttcctctaacttccttactctttctctcaagaggaggcaagtggctgtggcggccgcagcagtggctgatcatcactgaaaataccaaagaaaagaactgagctgcctccttcatattttttccattgaggattaatttaccgtgctttttcattttctctacatcctgcaaaagtttttttctctcctaagaaacaaactatgaactgattgttgaaaaaaagaagtaaaaagttttagcacagcttctctgtctcttcgggacaagttagaaaattctgaagtgagccgaagcatagtaagtgctttctttctttttaagctacttctggggagggaggaggctattgtaatggtaaatttcactccgagaggaagaaagggttgataatcaatcaaaaatgaggtattcctttgagtatttgtgattttcttactatattgtaagatgcttttaattttctctgtaaaataggcagaaatggttttagtgtgtgtatgtgtgaaataaaagctcagaaaagcaatcttcagagcgccactgaaggaagttttgacgaacggagtagagatgtataccacttgggggcttcagtgagaacccagaattcctggaggaggatttacattcagaaatgttgaagtgaaaattccttctggttcagcatcttggagttcagcttggaagaacattttacgtatggaagaatttgcttctccaaacctctcttttggccattgtgtgtcctgaaggatgggacaacttgtgctgtagaagcactgcttgcctgagtttgcttcaggcattttaaatttaacttgagggatcatgtgtttggcatgatgaggaccactgaagacttccacaagcctagtgccacattaaactctaacacggccaccaagggaaggtacatttatctggaggcattcctggagggaggagctccctggggttttactctaaagggtggcctggagcacggagaaccattaatcatctctaaggtcgaagaagggggcaaagcagacaccctgagctccaaactgcaggctggggatgaggttgtgcacatcaatgaggtgactctgagcagctccagaaaggaggcagtttccctggtgaaaggatcctacaagaccctcaggctggtagtgcgcagagatgtgtgcacagacccaggccatgcagatactggtgcctctaacttcgtcagcccagaacacctcacctctggcccccagcacaggaaagcagcgtggtcaggaggggttaaacttcggctgaagcacaggcgcagtgagcctgcaggccgacctcactcgtggcacacaactaaatctggggagaagcaacccgatgccagcatgatgcagatatctcagggtatgatcggccctccttggcaccaaagctaccattccagctcctctactagtgacctctccaactatgaccatgcttatctaaggcggagccctgaccagtgcagctcccaggggagcatggagagcctggagcccagtggggcatacccaccctgtcatctttcccctgccaagtccaccggcagcattgaccagctcagccacttccataacaagagagactcggcttacagctctttctccaccagttctagcatcctagagtatccacaccctggcatctctggccgggagcgttcaggctccatggacaatacttctgctcgaggtggcctcctcgaagggatgaggcaggcagatattcgctatgtcaagacagtctatgacacccggaggggagtctcagcagagtatgaggtgaactcttcagccctgctgcttcaaggtagggaggcccgagcctcagcaaatggtcagggctatgataaatggtctaatattcctcggggcaagggagtgccacccccatcctggagccagcagtgccccagttccttggagactgccacggacaaccttcctcctaaggtgggtgcacccctgcctccagctcggagtgacagttacgcagcatttcggcaccgtgagcggcccagctcctggtctagccttgatcagaaacggctctgccggcctcaggcaaactctttaggctccctgaagtctccattcatagaggagcagctgcatactgtgctggagaagagtccagagaacagccccccagtgaagcccaagcataactatacccagaaggcccaacctggccaacctctgctgccgaccagcatctacccggtaccttccctggagccacactttgcccaggtgcctcagccttctgtgagtagcaacggtatgctctaccctgcactggccaaggagagtggatacatagcccctcagggagcatgcaacaagatggctaccattgatgagaatgggaaccagaatggatctggcaggcctgggtttgccttctgccagcccttagaacatgacttgctgtccccagtggagaagaaaccagaagctacagccaagtatgtcccctccaaagtccatttctgttcagtgcctgaaaatgaggaggatgcctccctgaagagacatctcacacctccccaaggcaacagcccacattccaatgagagaaagagcacccacagtaacaaaccatcttctcatccccacagcctcaaatgccctcaggctcaggcctggcaagcgggtgaagacaagagatcttccaggctctcagagccctgggagggcgatttccaggaagaccacaatgccaacctctggaggaggctggagagagaaggcctaggccagagcctgtcaggcaactttggcaagaccaagtcagccttctcatctctccagaacattcctgagagtctgagaagacacagcagcctggagctaggccggggaacccaggagggttaccccgggggcaggcccacctgtgcagtcaacaccaaggcagaagaccctgggaggaaagccgctcctgacctcgggagccatctggaccggcaggtttcctacccgcggcccgaggggaggaccggtgcctcggcttctttcaacagcacagacccaagtcccgaagagccgcctgccccctcgcacccgcacacatccagtctgggccggagggggcccggcccaggcagcgcctcggctcttcagggctttcagtacgggaagccccactgctcggtgctggagaaggtctccaaattcgagcagcgagagcaagggagccagagaccgagtgtgggcggctctggttttggccataactataggccccacaggaccgtctcaacttccagtacttctgggaatgacttcgaggagacaaaagcacacattcgtttctctgagtcagctgaacccctaggcaacggggagcagcacttcaaaaacggggagctgaagttggaagaggcttcccggcagccctgcggtcagcagctgagcggaggagcgtcggacagcggccgtggcccccagaggccggacgctcggctcctccgtagccagagcaccttccagctctccagcgagccagagagggagcccgagtggcgggacaggcccggctcgcccgaatcgcccctgctggatgcccccttcagccgcgcctaccggaacagcatcaaggacgcacagtcccgtgtcttgggggccacctcctttcgacgtcgagacctggagctgggggcgcccgtggcgtcgaggtcctggcggccacggccttcctcggcccacgtggggctgcggagccccgaggcgtcggcctccgcctccccgcacacgccccgggagcggcacagcgtgacccctgctgagggcgacctggccaggcccgtgccccctgccgcccggagaggtgctcgccggcgcctgactcccgagcagaagaagcgctcctactcggagcccgagaagatgaacgaggtggggatcgtggaggaggccgaaccggcacccctgggcccgcagagaaatgggatgcgtttcccggagagcagcgtggccgaccggcgccgtctcttcgagcgcgatggcaaggcctgctccacgctcagcctgtcggggcccgagctgaagcagttccagcagagcgccctggcggactacatccagcgcaagaccggcaagcggcctacctccgccgccggctgcagcctccaggagcccgggccactgcgtgagcgcgcccagagtgcctacctccagcccggccccgcggcgctcgaaggctccggcctcgcctcggcctccagcttgagctcactgcgggagcccagcctgcagccccgcagggaggccacgctcctgccggccacagttgcagaaacccagcaggctccccgagatcgcagcagctccttcgccggtggccgccgcctcggggaacggcgacgcggggacctgcttagcggagcaaacggtggaacaaggggcacccagagaggggatgagacccccagggagccatcctcctggggggccagggccgggaagtccatgtcggccgaggacctgctggaacgctcggacgtccttgcgggccctgtccatgtgaggtccaggtcatctcccgccaccgcagacaagcgccaggatgtgcttttggggcaagacagtggctttggtcttgtgaaggatccatgttatttggctggtcctggatctaggtcactcagttgttcagaaagaggccaagaagagatgctgccgctcttccaccatctcacccctcgttggggtggttcaggctgcaaagccattggtgattcctccgttcctagtgaatgtcctggaaccctggaccatcagaggcaagccagtaggacaccctgccccaggccaccactggcaggaacgcaagggctggtcacagacaccagggctgcacccctgaccccaattggcacccctctgccttcagccattccctctggctactgctcacaggacggtcagacagggcgacagcctctcccgccctacacccctgccatgatgcacagaagcaatggtcacaccctgacccagcctcccggtccaagaggctgtgagggcgatggcccagagcatggggtagaagagggaacgaggaagagggtctcgctgcctcagtggccacctccttctcgagcaaagtgggcccacgcagccagagaggacagccttcctgaggaatcctcagcccctgattttgcaaacctgaagcactatcaaaaacagcagagtcttccaagtttatgcagcacttctgacccagacacacctcttggggccccgagcactccagggaggatctccctccgaatatctgagtctgtcctgcgggactccccgccacctcatgaggattatgaagacgaagtgtttgtgagggatccgcaccccaaggccacgtccagccccacatttgaacctcttcccccacccccacctcctccaccgagtcaggaaaccccggtgtatagcatggatgacttccctccacctcctccccacactgtatgtgaggcgcagctggacagtgaggatcccgaggggccacgccccagcttcaacaaactttctaaagtgacaattgcaagggaaaggcacatgcctggtgcagcccatgtggtaggtagtcagacactggcttccagactccaaacttctatcaagggttcagaggctgagtccacaccaccctccttcatgagcgttcacgcccaacttgctgggtctcttggtgggcagccagcacccatccagactcaaagcctcagccatgatccagtcagtggaactcagggtttagaaaagaaagtcagtcctgatcctcagaagagttcagaagacatcagaacagaggctttggccaaggaaattgtccaccaagacaaatctctagcagacattttggatccagactccaggctgaagacaacaatggacctgatggaaggtttgtttccccgagatgtgaacttgctgaaggaaaacagtgtaaagaggaaggccatacagagaactgtcagctcttcaggatgtgaaggcaagaggaatgaagacaaggaagcagtgagcatgttggttaactgccctgcctactacagtgtgtctgctcccaaggctgagctactgaacaaaatcaaagagatgccagcagaagtgaatgaggaagaggaacaggcagatgtcaatgaaaagaaggctgagctcattggaagtctcacccacaagctggagaccctccaggaggcgaaggggagcctgctcacggacatcaagctcaacaacgccctgggagaagaggtggaggctctgatcagcgagctctgcaagcccaatgagtttgacaagtataggatgttcataggggatttggacaaggtggtcaacctgctgctctccctctcggggcgtctagcccgtgttgagaatgtccttagcggccttggtgaagatgccagtaatgaagaaaggagctctctttacgagaaaaggaagatcctggctggtcagcatgaggatgcccgggagctgaaggagaacctggatcgcagggagcgagtagtgctgggcatcttggccaattacctttcagaggagcagctccaggactaccagcacttcgtgaaaatgaagtccacgctcctcattgagcaacggaagctggatgacaagatcaagctgggccaggagcaggtcaagtgtctgctggagagcctgccctcagatttcattcccaaggctggggccctggctctgcccccaaacctcacgagtgagcccattcctgctgggggctgtactttcagtggtattttcccaacattaacctctccactttaacctcttctaaaatacccaaccaaaagatcactgtttctctcaacactatttaatctgaaaaatgtttcagtacaaaccactgtttgaactatctgggttattggtgtttgttcctgatgaaaggaaaaaaattctctccaggaggaagcctttttccttcttgcccttcctgattgatcttctgagagctcgaatgctgctggacacgtacccctttctattattactttgtagtagaaagaaagttaatgaaactgagaactgattggagggtgtttgatcatttagtttttaacaggctgaggcaacatggatcagtgtgtgtccccctcaggaatgtatccacagtggccttccttgctggtgggcagtgtatcctgatggcagggtacaagtaccattaatgaagggtctgcaacataaagccttaaaaagacacacactaagaaaactgtaaaaccttgaacattgttatttatattttttaaaatggaaaagatcactatgtttgttgtgctaaccacttatttgattctgttttgtggtggacatagatgattacgtttgagctttgtattttgtgaaaaccttaatgaaatgaattccaaagatagtcacgttgagcgtgaagactttttttcttacattcctgtcttatttttaccaacacgagcaggcattctgcgcttccactggactgagtatgggggagtcctgctcccctcctgtctcacaccttccccaggaggaaggcctcatgcactgcggttattgcatcatttcctagtgcttcatgtcattatcactggtggggaaacaaagctaaattttattaacaaagacaactctcagacctatataataggaggaggacgtccagaatccaacaaaattcaaacggagcccatgctgttctcctgaacaagatttgggctaaatacggcctgtttattgaggctgttttaatgatgctttaaaaaaaaaaaatgttttctaaaatgtcaaacctgttgaccacactttgattaaaaactgcctccttaacctctgaagactgattttgctttatcatgtttcaataataacatttcagaggttactctgtagccccagttgtaagcttataaaaacaaactggaaggctgaggaggttatgggctggcagccaggctatgtttacagctgctggagatggcagtagccttatactttgagcaggtagtacatcccaggctgtgctagaggtagatttgttttttcacgtttgatctgtggctggtggccacctttgttgatttgggcttacgagtttcatagtagccagtcttagaaaattgggggagtaaaattttgaagtaaaaaaaaaaaaaaaatgacaagggaaccaaatgctccttctccccttagtacattttcattacttaatgaagttttatctcctatgtaagaatatcaaaattgtagtttgggtctccagtagagatgtcttttgattaacttataaacaactggccacccagaagtttcctttgcatagtcaaccaaagctatggctttgttctttggagcttatatactgcatgactccattgatacaaataagacagcaccttggtttcccagggatgttttcattcagaggtcctgtctcccaggaaagcagtagaaccagtgacagcattcaacagccacactgcatggtcatcagtcttaggccaacatgggagcctgaaattaactccatcagtaactacctgtgtgtcttgctgatactgaatgagccctcacaagccaagccaggtggaagacagccagcaaacgtctacagttattcttagtgaaattcctcagaggaatccagggggctcccagttcccaacactcttcgagatgaccatttttcgggatttgactggggaacattttacatattcagtctttctcaaaaatttttatttattttcttgagaaagggtcttactatgttgcccaggctggagtgcagagtggtgcgataacagctcattgcagtctgaacctctgaggctcaagccatcctcccatctcagcctcccaagtagctgggaccacaggtgtgcaccactatgcttggctaattttttgattttttatagagacgggggtctcgctatgttgcccaggctggtttcaaactcctgggctcaagggatccttccgctttggtcccagaagtgctgggattacaggcatgagccacttcacccagccacttttctaatttatagacataaaagtaattgactcccacagcacagtaacaggcaatgctgcttggcatgccacaaacatctgaaagcttgtgacactcctaggattgtgtccattctttcattatgtggaaactttgttctgttatgtgaaatgggtaaggcaccaagtgagactttgaaatctaatttttaggtggatgtgatatttattgtaataggacttgacctctgtactttaaagaaatcactaaccaaattttcaaagtttccttttaaatgcgtttagctagaaatctatgtatttatccctttcctattttgcattcttctcccactatttttaaaaactcatttacagtagaaaccattcttctttctcccaacagtatcctttgccaagaccatgagaacagtaaggagcatgttgttggtcagggtttcagaatacgcgtgatgtcactgagaatgtttgctcacagtcaataattgtctttgtggatgtgataattttggagatacacttctggtcagaactcaggtgagataatcttgcaatactccaaatgcagatactccagccacccgcaaggttccaggaaaggacaatgtcctgcgagaaaatcaggaggcctccacttcctgggccacttgagaagttcctgggcatgtcactacatgttggttgactcagccatttctcatgctgttttgtttcttgcggtggccacttaaccccaaagaatgaagggaggatccacagtgaaagtgcctgagtttctctatgagaccagatgctgtcgaaaccaaacatcttttcctttgctctatgggaacattttagggtttgttttgcacagctggtttccagactagaagattaacaagtttgggtccacccctaagaatcagtggctgtcttttaaggtgaggagtgtgggcttaactgaggtcctttgagggagctataaaggagaaacaacctgggacatcccagttttcctattcctccactgttaatatctcatctaaaataattcatgagtttaaatggtaaatatatgctttaagctctacctttaaacttgtatgttattcaggcatctcttattaagatactgggtctctggatacccaaggaaatgttggctttttattcttatgtggttccaaatttacttctcttcagtttaattgtccatggtagtgctggcttcattgttaggttggagttattattttccttttagaacaacatgaattttattcaccttactattagaaaaaggaataactacagccagaaataacttcatttcctacaaggtataaaaagtggtcaagtgaatgtgaaggggcttttctacacaggaatatattatcgggaacaaagtatttcctgctgccttaactctttgggatgcataggataaaatgataaagaccattttaatatcagaaagggttgtcttattaatttttaaataaaacttcacatttcttaatggggagctcattcagaaactaaataatggtttctcaaagtgtggtcaggatacgatctgcatcagaatccttggaatgcttgttaaaaataccaattgctatgacaaaaccaagtctgctggaaactgcatttcagcaggtttcccatgttattctgatgtattttaacatttgagagccactaccaatcatctgtacagttcctactgttatgatcacaataagactaacatgaatttaataatctgaataatttttaaaatttaaataaacagaaattgaagttaaatttaaaaataaaaataacctcagaagttgaaaaaa

SEQ ID NO: 68 - protein, 1996 aa, homo sapiens
MMRTTEDFHKPSATLNSNTATKGRYIYLEAFLEGGAPWGFTLKGGLEHGEPLIISKVEEGGKADTLSSKLQAGDEVVHINEVTLSSSRKEAVSLVKGSYKTLRLVVRRDVCTDPGHADTGASNFVSPEHLTSGPQHRKAAWSGGVKLRLKHRRSEPAGRPHSWHTTKSGEKQPDASMMQISQGMIGPPWHQSYHSSSSTSDLSNYDHAYLRRSPDQCSSQGSMESLEPSGAYPPCHLSPAKSTGSIDQLSHFHNKRDSAYSSFSTSSSILEYPHPGISGRERSGSMDNTSARGGLLEGMRQADIRYVKTVYDTRRGVSAEYEVNSSALLLQGREARASANGQGYDKWSNIPRGKGVPPPSWSQQCPSSLETATDNLPPKVGAPLPPARSDSYAAFRHRERPSSWSSLDQKRLCRPQANSLGSLKSPFIEEQLHTVLEKSPENSPPVKPKHNYTQKAQPGQPLLPTSIYPVPSLEPHFAQVPQPSVSSNGMLYPALAKESGYIAPQGACNKMATIDENGNQNGSGRPGFAFCQPLEHDLLSPVEKKPEATAKYVPSKVHFCSVPENEEDASLKRHLTPPQGNSPHSNERKSTHSNKPSSHPHSLKCPQAQAWQAGEDKRSSRLSEPWEGDFQEDHNANLWRRLEREGLGQSLSGNFGKTKSAFSSLQNIPESLRRHSSLELGRGTQEGYPGGRPTCAVNTKAEDPGRKAAPDLGSHLDRQVSYPRPEGRTGASASFNSTDPSPEEPPAPSHPHTSSLGRRGPGPGSASALQGFQYGKPHCSVLEKVSKFEQREQGSQRPSVGGSGFGHNYRPHRTVSTSSTSGNDFEETKAHIRFSESAEPLGNGEQHFKNGELKLEEASRQPCGQQLSGGASDSGRGPQRPDARLLRSQSTFQLSSEPEREPEWRDRPGSPESPLLDAPFSRAYRNSIKDAQSRVLGATSFRRRDLELGAPVASRSWRPRPSSAHVGLRSPEASASASPHTPRERHSVTPAEGDLARPVPPAARRGARRRLTPEQKKRSYSEPEKMNEVGIVEEAEPAPLGPQRNGMRFPESSVADRRRLFERDGKACSTLSLSGPELKQFQQSALADYIQRKTGKRPTSAAGCSLQEPGPLRERAQSAYLQPGPAALEGSGLASASSLSSLREPSLQPRREATLLPATVAETQQAPRDRSSSFAGGRRLGERRRGDLLSGANGGTRGTQRGDETPREPSSWGARAGKSMSAEDLLERSDVLAGPVHVRSRSSPATADKRQDVLLGQDSGFGLVKDPCYLAGPGSRSLSCSERGQEEMLPLFHHLTPRWGGSGCKAIGDSSVPSECPGTLDHQRQASRTPCPRPPLAGTQGLVTDTRAAPLTPIGTPLPSAIPSGYCSQDGQTGRQPLPPYTPAMMHRSNGHTLTQPPGPRGCEGDGPEHGVEEGTRKRVSLPQWPPPSRAKWAHAAREDSLPEESSAPDFANLKHYQKQQSLPSLCSTSDPDTPLGAPSTPGRISLRISESVLRDSPPPHEDYEDEVFVRDPHPKATSSPTFEPLPPPPPPPPSQETPVYSMDDFPPPPPHTVCEAQLDSEDPEGPRPSFNKLSKVTIARERHMPGAAHVVGSQTLASRLQTSIKGSEAESTPPSFMSVHAQLAGSLGGQPAPIQTQSLSHDPVSGTQGLEKKVSPDPQKSSEDIRTEALAKEIVHQDKSLADILDPDSRLKTTMDLMEGLFPRDVNLLKENSVKRKAIQRTVSSSGCEGKRNEDKEAVSMLVNCPAYYSVSAPKAELLNKIKEMPAEVNEEEEQADVNEKKAELIGSLTHKLETLQEAKGSLLTDIKLNNALGEEVEALISELCKPNEFDKYRMFIGDLDKVVNLLLSLSGRLARVENVLSGLGEDASNEERSSLYEKRKILAGQHEDARELKENLDRRERVVLGILANYLSEEQLQDYQHFVKMKSTLLIEQRKLDDKIKLGQEQVKCLLESLPSDFIPKAGALALPPNLTSEPIPAGGCTFSGIFPTLTSPL

SEQ ID NO: 69 - DNA, 3216 bp, homo sapiens
gggcgcgcggctgcagcggcggagccggagtcggagccgggagcgctagcggcagccggatcgcagcctgcggggcccgccgcagccatgggcaaccgcggcatggaagatctcatcccgctggtcaaccggctgcaagacgccttctctgccatcggccagaacgcggacctcgacctgccgcagatcgctgtggtgggcggccagagcgccggcaagagctcggtgctcgagaatttcgtaggcagggacttcttgcctcgaggatctggcattgtcacccgacgtcccctggtcttgcagctggtcaatgcaaccacagaatatgccgagttcctgcactgcaagggaaagaaattcaccgacttcgaggaggtgcgccttgagatcgaggccgagaccgacagggtcaccggcaccaacaagggcatctcgccggtgcctatcaacctccgcgtctactcgccgcacgtgctgaacctgaccctggtggacctgcccggaatgaccaaggtcccggtgggggaccaacctcccgacatcgagttccagatccgagacatgcttatgcagtttgtcaccaaggagaactgcctcatcctggccgtgtcccccgccaactctgacctggccaattctgacgccctcaaggtcgccaaggaggtggacccccagggccagcgcaccatcggggtcatcaccaagctggacctgatggacgagggcacagatgcccgtgatgtgctggagaacaagctgctccccctgcgcagaggctacattggagtggtgaaccggagccagaaggacattgatggcaagaaggacattaccgccgccttggctgctgaacgaaagttcttcctctcccatccatcttatcgccacttggctgaccgtatgggcacgccctacctgcagaaggtcctcaatcagcaactgacgaaccacatccgggacacactgccggggctgcggaacaagctgcagagccagctactgtccattgagaaggaggtggaggaatacaagaacttccgccctgatgacccagctcgcaagaccaaggccctgctgcagatggtccagcagttcgccgtagactttgagaagcgcattgagggctcaggagatcagatcgacacctacgaactgtcagggggagcccgcattaaccgaatcttccacgagcgcttccctttcgagctggtcaagatggagtttgatgagaaggaactccgaagggagatcagctatgctatcaagaatatccatggcattagaacggggctgtttaccccagacatggcctttgagaccattgtgaaaaagcaggtgaagaagatccgagaaccgtgtctcaagtgtgtggacatggttatctcggagctaatcagcaccgttagacagtgcaccaagaagctccagcagtacccgcggctacgggaggagatggagcgcatcgtgaccacccacatccgggagcgcgagggccgcactaaggagcaggtcatgcttctcatcgatatcgagctggcttacatgaacaccaaccatgaggacttcataggctttgccaatgctcagcagaggagcaaccagatgaacaagaagaagacttcagggaaccaggatgagattctggtcatccgcaagggctggctgactatcaataatattggcatcatgaaagggggctccaaggagtactggtttgtgctgactgctgagaatctgtcctggtacaaggatgatgaggagaaagagaagaaatacatgctgtctgtggacaacctcaagctgcgggacgtggagaagggctttatgtcgagcaagcatatctttgccctctttaacacggagcagaggaatgtctacaaggattatcggcagctggagctagcctgtgagacacaggaggaggtggacagctggaaggcctccttcctgagggctggcgtgtaccctgagcgtgttggggacaaagagaaagccagcgagaccgaggagaatggctccgacagcttcatgcattccatggacccacagctggaacggcaagtggagaccatccggaatcttgtggactcatacatggccattgtcaacaagaccgtgagggacctcatgcccaagaccatcatgcacctcatgattaacaataccaaggagttcatcttctcggagctgctggccaacctgtactcgtgtggggaccagaacacgctgatggaggagtcggcggagcaggcacagcggcgcgacgagatgctgcgcatgtaccacgcactgaaggaggcgctcagcatcatcggcgacatcaacacgaccaccgtcagcacgcccatgcccccgcccgtggacgactcctggctgcaggtgcagagcgtaccggccggacgcaggtcgcccacgtccagccccacgccgcagcgccgagcccccgccgtgcccccagcccggcccgggtcgcggggccctgctcctgggcctccgcctgctgggtccgccctggggggggcgccccccgtgccctccaggccgggggcttcccctgaccctttcggccctccccctcaggtgccctcgcgccccaaccgcgccccgcccggggtccccagccgatcgggtcaggcaagtccatcccgtcctgagagccccaggccccccttcgacctctaaacagatccctcctcttctcggagacctccctttccaagcctgcctggacggctgttctgtgacttgacagtggctcccccagccccaaagccagcccccttcatctgtgacttaatctgttgtagtggtgagctgatacattcaggtgtgaccgttggtgaaaacttgtgccccttctgtggtatgcccttgccctgttctataaatatctataaatactcatatatatacacacctacacatggccaaccgcctcgcctctagcgctgggaatcagtcactgtgctatccttgtggagtcttgtggcccaactaccagagaacgctgtcccccgacatcccactccaaagtgtgccacctccagtgagcctccttgtcatgcccggcctgtggacagccagcccccgccatccctcccaccccctaccaagcatgggggtgctgtgcaggcagccgtgtggcctgacagtttctaccagtcctgctgtccctcggctgagaataaaacccatttctggatgatggggaatgtc

SEQ ID NO: 70 - protein, 864 aa, homo sapiens
MGNRGMEDLIPLVNRLQDAFSAIGQNADLDLPQIAVVGGQSAGKSSVLENFVGRDFLPRGSGIVTRRPLVLQLVNATTEYAEFLHCKGKKFTDFEEVRLEIEAETDRVTGTNKGISPVPINLRVYSPHVLNLTLVDLPGMTKVPVGDQPPDIEFQIRDMLMQFVTKENCLILAVSPANSDLANSDALKVAKEVDPQGQRTIGVITKLDLMDEGTDARDVLENKLLPLRRGYIGVVNRSQKDIDGKKDITAALAAERKFFLSHPSYRHLADRMGTPYLQKVLNQQLTNHIRDTLPGLRNKLQSQLLSIEKEVEEYKNFRPDDPARKTKALLQMVQQFAVDFEKRIEGSGDQIDTYELSGGARINRIFHERFPFELVKMEFDEKELRREISYAIKNIHGIRTGLFTPDMAFETIVKKQVKKIREPCLKCVDMVISELISTVRQCTKKLQQYPRLREEMERIVTTHIREREGRTKEQVMLLIDIELAYMNTNHEDFIGFANAQQRSNQMNKKKTSGNQDEILVIRKGWLTINNIGIMKGGSKEYWFVLTAENLSWYKDDEEKEKKYMLSVDNLKLRDVEKGFMSSKHIFALFNTEQRNVYKDYRQLELACETQEEVDSWKASFLRAGVYPERVGDKEKASETEENGSDSFMHSMDPQLERQVETIRNLVDSYMAIVNKTVRDLMPKTIMHLMINNTKEFIFSELLANLYSCGDQNTLMEESAEQAQRRDEMLRMYHALKEALSIIGDINTTTVSTPMPPPVDDSWLQVQSVPAGRRSPTSSPTPQRRAPAVPPARPGSRGPAPGPPPAGSALGGAPPVPSRPGASPDPFGPPPQVPSRPNRAPPGVPSRSGQASPSRPESPRPPFDL

SEQ ID NO: 71 - DNA, 2105 bp, homo sapiens
agactccgcccaagcatgcacacacacaggcttgatgctcgctcccgtttctacaggaggttttgacggctggatgctgcagggcatcccctcgcctggaggaggttcacttgtggccaggttcccagcacacccacttgctcactggggccctggggacaccgccacactcgagcccatcctacggcctcaatccttaccagtccccaggccatggactgccacactgtaggtcttcaatcaaggttcagtggagtttcgaatgtacacacaccctgaaagacagcgcggccacctcagaaaacaacgcgcgcccagctggctcccctccgacagggcccacggctactgggtcggcctcctccggaccctgagcacagcctggtatgcgtgcgggctcggaatacggatctgagcagaagaaatgcgagtggagagcggttctgcgcaggaaagaggaattttgttggaaagcctgtcgacgttgctagaaaagaccacagcatctcacgaggggcgtgcgccgggaaaccgggagttgacggacctcctgccccccgaggtctgcagtctcctgaacccagcagccatctacgccaacaacgagatcagcctgcgtgacgttgaggtctacggctttgactacgactacaccctggcccagtatgcagacgcactgcaccccgagatcttcagtaccgcccgtgacatcctgatcgagcactacaagtacccagaagggattcggaagtatgactacaaccccagctttgccatccgtggcctccactatgacattcagaagagccttctgatgaagattgacgccttccactacgtgcagctggggacagcctacaggggcctccagcctgtgccagacgaggaggtgattgagctgtatgggggtacccagcacatcccactataccagatgagtggcttctatggcaagggtccctccattaagcagttcatggacatcttctcgctaccggagatggctctgctgtcctgtgtggtggactactttctgggccacagcctggagtttgaccaagcacatctctacaaggacgtgacggacgccatccgagacgtgcatgtgaagggcctcatgtaccagtggatcgagcaggacatggagaagtacatcctgagaggggatgagacgtttgctgtcctgagccgcctggtggcccatgggaaacagctgttcctcatcaccaacagtcctttcagcttcgtagacaaggggatgcggcacatggtgggtcccgattggcgccagctcttcgatgtggtcattgtccaggcagacaagcccagcttcttcactgaccggcgcaagcctttcagaaaactcgatgagaagggctcacttcagtgggaccggatcacccgcttggaaaagggcaagatctatcggcagggaaacctgtttgacttcttacgcttgacggaatggcgtggcccccgcgtgctctacttcggggaccacctctatagtgatctggcggatctcatgctgcggcacggctggcgcacaggcgccatcatccccgagctggagcgtgagatccgcatcatcaacacggagcagtacatgcactcgctgacgtggcagcaggcgctcacggggctgctggagcgcatgcagacctatcaggacgcggagtcgaggcaggtgctggctgcctggatgaaagagcggcaggagctgaggtgcatcaccaaggccctgttcaatgcgcagttcggcagcatcttccgcaccttccacaaccccacctacttctcaaggcgcctcgtgcgcttctctgacctctacatggcctccctcagctgcctgctcaactaccgcgtggacttcaccttctacccacgccgtacgccgctgcagcacgaggcacccctctggatggaccagctctgcaccggctgcatgaagacccccttccttggtgacatggcccacatccgctgagggcacctttattgtctgggacaggccctcagcccctcctgccccatccacccagacaagcaataaaagtggtctcctccctgtgcatgcttctgctttcaaaaaaaaaaaaaaaaaa

SEQ ID NO: 72 - protein, 520 aa, homo sapiens
MRVESGSAQERGILLESLSTLLEKTTASHEGRAPGNRELTDLLPPEVCSLLNPAAIYANNEISLRDVEVYGFDYDYTLAQYADALHPEIFSTARDILIEHYKYPEGIRKYDYNPSFAIRGLHYDIQKSLLMKIDAFHYVQLGTAYRGLQPVPDEEVIELYGGTQHIPLYQMSGFYGKGPSIKQFMDIFSLPEMALLSCVVDYFLGHSLEFDQAHLYKDVTDAIRDVHVKGLMYQWIEQDMEKYILRGDETFAVLSRLVAHGKQLFLITNSPFSFVDKGMRHMVGPDWRQLFDVVIVQADKPSFFTDRRKPFRKLDEKGSLQWDRITRLEKGKIYRQGNLFDFLRLTEWRGPRVLYFGDHLYSDLADLMLRHGWRTGAIIPELEREIRIINTEQYMHSLTWQQALTGLLERMQTYQDAESRQVLAAWMKERQELRCITKALFNAQFGSIFRTFHNPTYFSRRLVRFSDLYMASLSCLLNYRVDFTFYPRRTPLQHEAPLWMDQLCTGCMKTPFLGDMAHIR

SEQ ID NO: 73 - DNA, 733 bp, homo sapiens
aaacagcaggaaatagaaacttaagagaaatacacacttctgagaaactgaaacgacaggggaaaggaggtctcactgagcaccgtcccagcatccggacaccacagcggcccttcgctccacgcagaaaaccacacttctcaaaccttcactcaacacttccttccccaaagccagaagatgcacaaggaggaacatgaggtggctgtgctgggggcaccccccagcaccatccttccaaggtccaccgtgatcaacatccacagcgagacctccgtgcccgaccatgtcgtctggtccctgttcaacaccctcttcttgaactggtgctgtctgggcttcatagcattcgcctactccgtgaagtctagggacaggaagatggttggcgacgtgaccggggcccaggcctatgcctccaccgccaagtgcctgaacatctgggccctgattctgggcatcctcatgaccattggattcatcctgttactggtattcggctctgtgacagtctaccatattatgttacagataatacaggaaaaacggggttactagtagccgcccatagcctgcaacctttgcactccactgtgcaatgctggccctgcacgctggggctgttgcccctgcccccttggtcctgcccctagatacagcagtttatacccacacacctgtctacagtgtcattcaataaagtgcacgtgcttgtgaaaaaaaaaaaaaaaaa

SEQ ID NO: 74 - protein, 125 aa, homo sapiens
MHKEEHEVAVLGAPPSTILPRSTVINIHSETSVPDHVVWSLFNTLFLNWCCLGFIAFAYSVKSRDRKMVGDVTGAQAYASTAKCLNIWALILGILMTIGFILLLVFGSVTVYHIMLQIIQEKRGY

SEQ ID NO: 75 - DNA, 1743 bp, homo sapiens
gtgcgcgggggcccgaccaccgcggggccgggacgcgatggcggcggcagagcccgcgagctcgggccagcaggcgccggcagggcaggggcagggccagcggccgccgccgcagcctccgcaggcgcaagccccgcagccgcccccgccgccgcagctcgggggcgccgggggcggcagcagcaggcacgagaagagcctggggctgctcactaccaagttcgtgtcgctgctgcaggaggccaaggacggcgttctggatctcaaagcggctgctgatactttggctgtgaggcaaaaaaggagaatttatgatatcaccaatgtcttagagggaattgacttgattgaaaaaaagtcaaaaaacagtatccagtggaaaggtgtaggtgctggctgtaatactaaagaagtcatagatagattaagatatcttaaagctgaaattgaagatctagaactgaaggaaagagaacttgatcagcagaagttgtggctacagcaaagcatcaaaaatgtgatggacgattccattaataatagattttcctatgtaactcatgaagacatctgtaattgctttaatggtgatacacttttggccattcaggcaccttctggtacacaactggaggtacccattccagaaatgggtcagaatggacaaaagaaataccagatcaatctaaagagtcattcaggacctatccatgtgctgcttataaataaagagtcgagttcatctaagcccgtggtttttcctgttcccccacctgatgacctcacacagccttcctcccagtccttgactccagtgactccacagaaatccagcatggcaactcaaaatctgcctgagcaacatgtctctgaaagaagccaggctctgcagcagacatcagctacagatatatcttcagcaggatctattagtggagatatcattgatgagttaatgtcttctgacgtgtttcctctcttaaggctttctcctaccccggcagatgactacaactttaatttagatgataacgaaggagtttgtgatctgtttgatgtccagatactaaattattagattccatggaaacttgggactgttatctacctctaactgtgtaacattttagacttcttaataacctaaatatttaaaataatgaatgtaacaccttttttagttcactgattctgaagtgttcttccctaatactttctttacttcacaaaacttcaaccataaaaacaaagggctctgattgctttaggggataagtgatttaatatccacaaacgtccccactcccaaaagtaactatattctggatttcaacttttcttctaattgtgaatccttctgttttttcttcttaaggaggaaagttaaaggacactacaggtcatcaaaaacaagttggccaaggactcattacttgtcttatatttttactgccactaaactgcctgtatttctgtatgtccttctatccaaacagacgttcactgccacttgtaaagtgaaggatgtaaacgaggatatataactgtttcagtgaacagattttgtgaagtgccttctgttttagcactttaagtttatcacattttgttgacttctgacattccactttcctaggttataggaaagatctgtttatgtagtttgtttttaaaatgtgccaatgcctgtacattaacaagatttttaaaaataaaattgtataaaacattcaaaaaaaaaaa

SEQ ID NO: 76 - protein, 346 aa, homo sapiens
MAAAEPASSGQQAPAGQGQGQRPPPQPPQAQAPQPPPPPQLGGAGGGSSRHEKSLGLLTTKFVSLLQEAKDGVLDLKAAADTLAVRQKRRIYDITNVLEGIDLIEKKSKNSIQWKGVGAGCNTKEVIDRLRYLKAEIEDLELKERELDQQKLWLQQSIKNVMDDSINNRFSYVTHEDICNCFNGDTLLAIQAPSGTQLEVPIPEMGQNGQKKYQINLKSHSGPIHVLLINKESSSSKPVVFPVPPPDDLTQPSSQSLTPVTPQKSSMATQNLPEQHVSERSQALQQTSATDISSAGSISGDIIDELMSSDVFPLLRLSPTPADDYNFNLDDNEGVCDLFDVQILNY

SEQ ID NO: 77 - DNA, 1754 bp, homo sapiens
tggagcagcggggcctggcacacagtaggcgttctataaatgtgtcacaagaatggcttccctcaggaaggcggcattaccgctgcctttctgcagaaaaggaaactaaggctcagcaagaaccaccgcccagccagagccaaggtcacagagcacgtccgtggcacgcgtccaggtcgtgccacagcagggccggcggcttcgacgcgggcagccgggtcccttttctttgacagatggggaaaccgaggcccggccggctgccggggctcctcgcacctaccccagcaactcaaattcaccacctcggactcctgcgaccgcatcaaagacgaatttcagctactgcaagctcagtaccacagcctcaagctcgaatgtgacaagttggccagtgagaagtcagagatgcagcgtcactatgtgatgtactacgagatgtcctacggcttgaacatcgagatgcacaaacaggctgagatcgtcaaaaggctgaacgggatttgtgcccaggtcctgccctacctctcccaagagcaccagcagcaggtcttgggagccattgagagggccaagcaggtcaccgctcccgagctgaactctatcatccgacagcagctccaagcccaccagctgtcccagctgcaggccctggccctgcccttgaccccactacccgtggggctgcagccgccttcgctgccggcggtcagcgcaggcaccggcctcctctcgctgtccgcgctgggttcccaggcccacctctccaaggaagacaagaacgggcacgatggtgacacccaccaggaggatgatggcgagaagtcggattagcagggggccgggacagggaggttgggaggggggacagaggggagacagaggcacggagagaaaggaatgtttagcacaagacacagcggagctcgggattggctaaactcccatagtatttatggtggccgccggcgggggccccagcccagcttgcaggccacctctagctttcttcctaccccattcccggcttccctcctcctcccctgcagcctggttaggtggatacctgccctgacatgtgaggcaagctaaggcctggagggtcagatgggagaccaggtcccaagggagcaagacctcgcgaagcgcagcagccccggcccttcccccgttttgaacatgtgtaaccgacagtctgcctgggccacagccctctcaccctggtactgcatgcacgcaatgctagctgcccctttcccgtcctgggcaccccgagtctcccccgaccccgggtcccaggtatgctcccacctccacctgccccactcaccacctctgctagttccagacacctccacgcccacctggtcctctcccatcgcccacaaaagggggggcacgagggacgagcttagctgagctgggaggagcagggtgagggtgggcgacccaggattccccctccccttcccaaataaagatgagggtactaaagttgtcttggtttttattttattattatttttttctttttccagtatactagcttgtcttttaagaaaggggatattaaaaaaaaaaaaagacaaaagtgtttttaaaaaaaagcaacacccacacctgtgtctgtatatagtcagcttatctcgtgttcaatcgtctgatctctacagagagaagtggaaaatgctgtatcaagggtgggcttagctgtgcctttccaataaagatgtgagaagcttcaaaaaaaaaaa

SEQ ID NO: 78 - protein, 264 aa, homo sapiens
MCHKNGFPQEGGITAAFLQKRKLRLSKNHRPARAKVTEHVRGTRPGRATAGPAASTRAAGSLFFDRWGNRGPAGCRGSSHLPQQLKFTTSDSCDRIKDEFQLLQAQYHSLKLECDKLASEKSEMQRHYVMYYEMSYGLNIEMHKQAEIVKRLNGICAQVLPYLSQEHQQQVLGAIERAKQVTAPELNSIIRQQLQAHQLSQLQALALPLTPLPVGLQPPSLPAVSAGTGLLSLSALGSQAHLSKEDKNGHDGDTHQEDDGEKSD

SEQ ID NO: 79 - DNA, 3748 bp, homo sapiens
agtgacgcgagacgcggggtgtggctctgccggcccaggcgcgatgaggcggctgcccgctgggtggcgccgatttcccggggaggtcccttctgggcccccggcggaggtgggagagagtcaggcaggagccgaggccggggagccctcttcgtcagctggtgctcactgcgccgcgccagcgccagccgggactcacccgcagctccatgcttgtgcccggttcgactcgtccatactccaagaagaggcagcccatgaggctcccagtccccactgagtgccaccctgaaggatgtcccagctctcctccaccctgaagcgctacacagaatcggcccgctacacagatgcccactatgccaagtcgggctatggtgcctacaccccgtcctcctatggggccaatctggctgcctccttactggagaaggagaaacttggtttcaagccggtccccaccagcagcttcctcacccgtccccgtacctatggcccctcctccctcctggactatgaccggggccgccccctgctgagacccgacatcactgggggtggtaagcgggcagagagccagacccggggtactgagcggcctttaggcagtggcctcagcgggggcagcggattcccttatggagtgaccaacaactgcctcagctacctgcccatcaatgcctatgaccagggggtgaccctaacccagaagctggacagccaatcagacctggcccgggatttctccagcctccggacctcagatagctaccggatagaccccaggaacctgggccgcagccccatgctggcccggacgcgcaaggagctctgcaccctgcaggggctctaccagacagccagctgccctgaatacctggtcgactacctggagaactatggtcgcaagggcagtgcatctcaggtgccctcccaggcccctccctcacgagtccctgaaatcatcagcccaacctaccgacccattggccgctacacgctgtgggagacgggaaagggtcaggcccctgggcccagccgctccagctccccgggaagagacggcatgaattctaagagtgcccagggtctggctggtcttcgaaaccttgggaacacgtgcttcatgaactcaattctgcagtgcctgagcaacactcgggagttgagagattactgcctccagaggctctacatgcgggacctgcaccacggcagcaatgcacacacagccctcgtggaagagtttgcaaaactaattcagaccatatggacttcatcccccaatgatgtggtgagcccatctgagttcaagacccagatccagagatacgcaccgcgctttgttggctataatcagcaggatgctcaggagttccttcgctttcttctggatgggctccataacgaggtgaaccgagtgacactgagacctaagtccaaccctgagaacctcgatcatcttcctgatgacgagaaaggccgacagatgtggagaaaatatctagaacgggaagacagtaggatcggggatctctttgttgggcagctaaagagctcgctgacgtgtacagattgtggttactgttctacggtcttcgaccccttctgggacctctcactgcccattgctaagcgaggttatcctgaggtgacattaatggactgcatgaggctcttcaccaaagaggatgtgcttgatggagatgaaaagccaacatgctgtcgctgccgaggcagaaaacggtgtataaagaagttctccatccagaggttcccaaagatcttggtgctccatctgaagcggttctcagaatccaggatccgaaccagcaagctcacaacatttgtgaacttccccctaagagacctggacttaagagaatttgcctcagaaaacaccaaccatgctgtttacaacctgtacgctgtgtccaatcactccggaaccaccatgggtggccactatacagcctactgtcgcagtccagggacaggagaatggcacactttcaacgactccagcgtcactcccatgtcctccagccaagtgcgcaccagcgacgcctacctgctcttctacgaactggccagcccgccctcccgaatgtagcgccaggagccacgtcccttctcccttccccgtggtggccccgctccctaaattttttaaaaagacaaaaacaaaacaacaacaacaacacacaaacctgacaagagaaaaacaaacctgaagctgccgagcaggagtggatgcagcctgatcagggtctggagcaaggagccgggctttcctgagctgtggcccggcagggaagatcgcctggacgtggagccagcatcgccccgtgccctcggcgtttgcatttgtaaacttgtggtcttcctatgtgtcagaaacaactgtgtcttgggggggaagaccctcgctgcgccgcttcccgccgcagcgcccgcgcctccgaggggacagcgccctctggagctcgctgggagcatcaccgcctggacgcccgcgccgcggaggagccggcgcccatctccacccgcacggctcgccggtccagagccatgagccaagagccctcttcacgctgctaactccaggggacagacgaagggacatctttggaaaacgctggttttggtttttaaaaagcccaactttttttttttaatttccataactaaagtgttcagactggagtgctctccttcaggcctcttcatagctgggacgttgcactggtccttttattgcttttccaagtacaactttctaatgctagccctccgtggtgctaggtgggcgttggccaggccccaagcacagccacagtagacctgggatctaaaacaagtttctgttttgggggtttgggttttttttttttttttttaatgttttgaatggaatttagttgcctccaagaattgtgccttatagcatttggggaccagggggtaactgcccctcctgaaatatccctcagcctcttcccttttccccagtgctctgttcaaacccgcctgggaaagggatcctgcccttagccctggctcgttgtgcattgcagtgaggcaaagaagaaagcaggtagattccttccgacagggcatcaagttcttcccgcccacgtcctctagcccacccctggtctgctccccagctgtttgaaggatagcacaagcccctcgtccctagagcttctctcccttttatttattctcttaacatccctttccccctggccttcctgcccccgcccccttctcagagcctcctagacaataggccctttggaccgagtttctcagggatgcccaggccacccctcagctcttcttagcgctggtctccagtcctgccctgggagctggagcctgggtatttggggacatcttgcctcagttgtatggttctttcctgtgggctcaattttgccctacatagttggataaaactctgtgctgtcctggagagtaaagctgttcacccacacagctgggcccggcttgtgccccgtggagcctggcacattccaggctcctaggaggaggcatcagagaaagacaccctgagttttactggcctgacacccttctccagagaagacctgtgaacctgagcccaagggcaagtgtacacttgtttactgtgtaagcaagagtagaagaatgtctaatgtacagtggaaccttgtacagaataaataatagctttgagaaatcaaaaaaaaaaaaaaaa

SEQ ID NO: 80 - protein, 605 aa, homo sapiens
MSQLSSTLKRYTESARYTDAHYAKSGYGAYTPSSYGANLAASLLEKEKLGFKPVPTSSFLTRPRTYGPSSLLDYDRGRPLLRPDITGGGKRAESQTRGTERPLGSGLSGGSGFPYGVTNNCLSYLPINAYDQGVTLTQKLDSQSDLARDFSSLRTSDSYRIDPRNLGRSPMLARTRKELCTLQGLYQTASCPEYLVDYLENYGRKGSASQVPSQAPPSRVPEIISPTYRPIGRYTLWETGKGQAPGPSRSSSPGRDGMNSKSAQGLAGLRNLGNTCFMNSILQCLSNTRELRDYCLQRLYMRDLHHGSNAHTALVEEFAKLIQTIWTSSPNDVVSPSEFKTQIQRYAPRFVGYNQQDAQEFLRFLLDGLHNEVNRVTLRPKSNPENLDHLPDDEKGRQMWRKYLEREDSRIGDLFVGQLKSSLTCTDCGYCSTVFDPFWDLSLPIAKRGYPEVTLMDCMRLFTKEDVLDGDEKPTCCRCRGRKRCIKKFSIQRFPKILVLHLKRFSESRIRTSKLTTFVNFPLRDLDLREFASENTNHAVYNLYAVSNHSGTTMGGHYTAYCRSPGTGEWHTFNDSSVTPMSSSQVRTSDAYLLFYELASPPSRM

SEQ ID NO: 81 - RNA, 2042 nt, homo sapiens
agcacccaagggcggcaaccaagcggggggaaccaccagcaagcaggccagggaggcgcagcaggacgcgcagaccccggagaaaaaaaaacaacgggcggaggacgacaggagagagacggggaagaaggcggcaaggcccaagaagagagaggcgggcagcgcccccaggccggccaggcgcccgacggcccacacgggccccagcccccgccgggcggaaggcgacaaccgcgaaaaggaggggacccccggcgggggccggggacacacaccccaaagcgaaacaggcccgggccggccgaagggcgcaaccccccccggcgccccaccggccccgcgcgcccccccgcgcccgagccgagccaagcagcgccggggagcgcgcaggccaccaggaccgccgcccgccgcggccgcgcccacgccgccaggccgagccagccggggcgccgcggacggaccggaaccgggcgagacagggagcgaaggccagggcgcgccaacccgacgcgggcgccgggccccagccgcgcggcgccgccgccagcccaccccccaaccccccaaaacaagcccaaggcggccgaggggcggacacccagcggccgggcaagagggggggacacccgcccacccgagcgacccgccgagagaacgagggcacacgccggcccgagcaacccacagaccagccaccggccggcccgccagcgaagcccaccacgacgccagcgccgcgaccaccaacaccggcgcccaccacgcgcgcagccccgcccgcgcccagaggcggccggccagcggcggggggcgcaggcacacgagggggcggaccgccggaacacacgggcgcccggccgggacgggggcccccgcacggacacccacgcaaccacaggaaccgaagacgggcaaagccccggccgggcaaacgggagacaagcccagcccggcgagaacgcaacccggcaacagccacacaaccaaacgagaccccgagggagcaagccccccaccagccccccggacaccagaaaaggggggcgggggggaaagaaccagggacgggaaacaaaacaggaaaacacagacaccacaagggcacaaacgggcgcacacgcggagggcgggaaaggggcaggccagagcacccgcagagccagaacagcgagagagcggaggcacccagccaccaacccccccgcccgacaaagggggaggcaaagcccagagacagcgacaaaggcacacagcaagcagggggagcagagcggagggaccgccccagccagggccccccacaccacaggccccgaggccccgccaggggagggcgagcccaacggcaagggaacaagaccgaaccgggaacggcccagagcccgaggaggaagaaaaagaagagaacgccggcagagcaaagaaacaaacagacaaacaagccaaaagaagaccaaaaaaaagaaggggagcaacccggaaaagaaccccaccaaagaaaaccggaaaccccagggaggcggaagcccccagcccgcagcagaggggcccagaaagaggacaggcaccccacaaaagaagagcacaggaggaaacaaggccccgaaccgaagagaacaaacagccgggacacgagacaacgaaagacaagggagagcccccacacagcccggcccgccaacagcagaacagggagaggcagaccgacccaaggaggcgagagcccaaacgcgcccaaacagcacccgcaaggaggacaagcaagccgcccaggagagaaaaaacaagagaaaggaaaaagaaccaccaaaccaccaggaaaacccgaaagggacacccgaacacacaacagaaaaagccaaaaggggacagcgagagggcaagaaaaacagagcacccaagggaaacagcaccgaaaaaaaaaaaaaaaaaaaaaaaaaaaaaaaaaaaaaaaaaaaaaaaaaaaaaaaaaaaaaaaaaaaaaaaaaaaaaaaaaaaaaaaaaaaaaaaaaaaaaaaaaaaaaaaaaaaaaaaaaaaa

SEQ ID NO: 82 - DNA, 5125 bp, homo sapiens
cgagactcagccagaggagtacggattaagtggccgaagaaagaggagtgaggcaggggagcgaggcggacgctccgagcgcatcggactcacctgggccggcggcgaccggcgagtacgagtggactcttgccctccgcagcatgcgccccgcctgctaagtcgccgccgtctcgccctcacctagcaccgccaatcccgcctggatggagtcccctctgggttcccattggctcctgtgagtgcttgggtgtcgggagcctgtttttggcgaggggaaccaacttttgaagttcgcccagaagactgcgttccagccccagttccccggcagcgggacccggcgaagacgcgaccgcggcgcgagtcaccatgggaagcaaaggtgtctaccagtaccactggcaaagccacaatgtcaagcacagtggtgtggacgacatggtgctactgtccaagatcacagagaactccatcgtggagaatctgaagaagagatacatggatgactacatttttacatatataggatctgtattaatctcagtcaaccctttcaagcagatgccatattttggggaaaaggaaattgaaatgtaccaaggagcggcacagtatgaaaacccaccacatatctatgcccttgcagataatatgtacagaaacatgatcattgacagagagaaccagtgcgtcattatcagtggtgaaagtggtgctggaaaaacagtggctgccaaatatatcatgagctacatctccagagtgtctggaggagggaccaaagtccagcacgtgaaggacattatcctgcagtccaacccgctgctggaggccttcgggaacgccaagaccgtccggaacaacaactccagccgatttggaaaatactttgaaatccagttcagtccaggtggggaaccagatggtggaaagatctccaacttccttctggaaaaatctagggtggtgatgaggaacccaggagagcggagttttcacatattttaccagctcatcgagggcgcctctgcagagcagaaacacagccttggcatcaccagcatggactattattactacctgagcctctcgggctcatacaaggttgatgacattgacgacaggcgggagtttcaggaaactctgcacgccatgaatgtgattgggatctttgcagaagagcaaacgctggtgttgcagatagtggcgggtattctccacctgggaaacatcagcttcaaagaagttggcaactacgcggctgtggagagtgaagagtttttagcttttcctgcatatctgctagggataaaccaggaccggttgaaagaaaagctaacaagccggcagatggatagcaagtggggaggcaaatccgaatccatccacgtgaccctcaacgtagagcaggcctgttacacccgggatgcgctcgccaaggccctgcacgcccgggtctttgatttcttggtagattccatcaataaagccatggagaaagaccatgaagaatacaacattggcgtcctagacatctatggctttgaaatattccagaaaaatggctttgaacagttttgtatcaattttgttaatgaaaaactgcagcagatttttattgaactgacattaaaggcagaacaggaagaatatgttcaagagggaataagatggacacccattgagtactttaataataaaatcgtatgtgacctcatagagaacaaagtgaaccctcctggcatcatgagcatcctggatgacgtgtgcgccacgatgcatgcggtgggtgagggggcagatcagacgctgctccagaaacttcagatgcagattgggagtcatgagcacttcaacagttggaaccaaggcttcatcattcatcattatgctgggaaggtatcctatgacatggatggcttttgtgaaaggaaccgggatgtgctttttatggatctcatcgagcttatgcagagcagcgagctgcctttcataaagtctttatttccggaaaatctgcaggctgacaagaaagggcgcccaactactgccggaagcaaaataaagaaacaagccaatgaccttgtgagcaccctgatgaaatgtacgccccactacattcgctgcatcaagccaaacgaaaccaagaagcccagagactgggaggaaagcagggtaaagcatcaagtcgaatatttgggtctgaaagagaacattcgagtgagaagagctggctatgcctatcggcgcatcttccaaaaattcctacagaggtatgccattctgaccaaagccacctggccttcttggcagggagaggagaagcaaggcgtcctgcacctgctgcagtcggtcaacatggacagcgaccagttccagctggggaggagtaaagtgttcatcaaagcccccgagtctctatttcttttagaagagatgagagagagaaagtatgatgggtatgctcgagtgatacagaaatcatggaggaaattcgtggcccggaagaaatacgttcaaatgagagaagaagcctcagacctcttattgaacaagaaggagagaaggagaaacagtattaacaggaactttataggggattatattgggatggaagagcacccagaactccagcagttcgtgggcaagagggagaagattgatttcgcagacacagtcaccaagtatgacaggaggttcaagggtgtaaagcgagacctgctccttaccccaaagtgcttgtacttaatcggacgagaaaaagtcaaacagggcccagacaagggcctggtgaaagaagtcctgaagcggaaaatcgagatagaacggatcttgtctgtgtccctcagtactatgcaggatgacatttttattctccatgagcaagagtatgacagtttgcttgaatctgtcttcaaaactgaattcctaagcctcttagcaaagcgttacgaggagaagacccagaagcaactacctctgaaattcagcaatacgcttgaactgaagttgaaaaaggaaaactggggcccctggagtgcagggggctcccggcaagtgcagttccaccaagggtttggggacctggctgtcctcaagcccagtaacaaagtgctgcaggtcagcatcggacctggactgcccaagaactcccgtcctaccagaaggaacactacccaaaatacaggttattccagtgggactcaaaatgccaactacccagtgagagctgcccctcctcccccaggataccatcagaacggagtcatcagaaaccagtatgtgccatatccccatgctcctggaagccagaggtccaatcagaaaagcctgtacacctccatggcccgcccgcccttgcctcggcagcagtctaccagttcagaccgagtgtcacagacgccagagagcctggatttcctcaaggtcccggaccagggagctgcaggggtcaggagacaaacaaccagtcggcctcccccagcagggggcagacccaagccccagcccaagcccaagcctcaggtgccacagtgcaaggctttgtatgcctatgacgctcaggacacagacgaactcagctttaatgccaatgacattattgatattatcaaagaagatccttctggctggtggacgggtcgactacgaggcaagcagggcctgttccccaacaactatgtgaccaagatctgaggtgcccgtgactctgacacatggggcagaggagctccaggcacagaccaggggaggggatatttaggggctccccttacaatccacaatgagcaattgcttctccaaggcctggagctattctggtaccttccccatggaggacactgaaaaggctgggttggggacagggagtatcactccataagtgatcctaaaaggtagcctcttcataggaacccaggaggacaaaaccaccatgcattaagatttatttattgtatttaaacctggtgagaggacaagtgaggtctgctcagaccttgtaggcttctatcaaaacagcaccctgcttgctcaccaggcctagagaatggctgtaggtggccgctgacaagtgcctttagttgaagagcacatttctttcatctctcttgtccatacctgatagacacattcctctctgccaccttccttcagggaggacccgccctctgcagactgggcttagcgtgagcaggcacttcccatgtacgtgccaagggtaagctggcctgctgagcccagggcgacagaggggcactggtttacactttgccgggaccatcagggccgccaagcaggtcaggggctgggggctgggggctgggctgctggctttgctttctctgggtcttcaattagaatgtggctggcccatattggtttgtgtttaaatgctgtacttactacaagaaggatcttttttcaagctgtacatttataaaaacagatcatatactgtatatataaaaatcttgagatggtagaaacatgtatgaatgtactaagtagtattccactgtactcattcataaggtaggttttcttacaaaactcacaccaggtacttaaagatgtgctctgcttttttccaactacggagtgtcactgctttctaggtcagtccctgcagactcttctcaactctttccctataggaaacttactccgcgtcctgcccccacctcctaaataaataaaggaatcggcgaacaccttcttcttttatgacatttgttatgggttgaattgtgtgcctccaaagaagatgttggagtcccagccaccagtacctcacaatatgaccttatttggaaatagagtctttatggagcaaacaaacaaaactaattaaaatgaagtcattagagtgggtcttaatccaatataatggtgtcctgatgaaaaggggaaatttggacacagagaccaacatgccagaggaaagaccatgtgaaaaggcagggagaagacagccattcacaagccctggacagaggcctggaacagattctccctcacaccctcacaaggaaccagccctgcccaccttggtcttggacttccaacctccagaactgtgaggcaatacatttcgctgtttaagccaaaaaaaaaaaaaaaa

SEQ ID NO: 83 - protein, 1108 aa, homo sapiens
MGSKGVYQYHWQSHNVKHSGVDDMVLLSKITENSIVENLKKRYMDDYIFTYIGSVLISVNPFKQMPYFGEKEIEMYQGAAQYENPPHIYALADNMYRNMIIDRENQCVIISGESGAGKTVAAKYIMSYISRVSGGGTKVQHVKDIILQSNPLLEAFGNAKTVRNNNSSRFGKYFEIQFSPGGEPDGGKISNFLLEKSRVVMRNPGERSFHIFYQLIEGASAEQKHSLGITSMDYYYYLSLSGSYKVDDIDDRREFQETLHAMNVIGIFAEEQTLVLQIVAGILHLGNISFKEVGNYAAVESEEFLAFPAYLLGINQDRLKEKLTSRQMDSKWGGKSESIHVTLNVEQACYTRDALAKALHARVFDFLVDSINKAMEKDHEEYNIGVLDIYGFEIFQKNGFEQFCINFVNEKLQQIFIELTLKAEQEEYVQEGIRWTPIEYFNNKIVCDLIENKVNPPGIMSILDDVCATMHAVGEGADQTLLQKLQMQIGSHEHFNSWNQGFIIHHYAGKVSYDMDGFCERNRDVLFMDLIELMQSSELPFIKSLFPENLQADKKGRPTTAGSKIKKQANDLVSTLMKCTPHYIRCIKPNETKKPRDWEESRVKHQVEYLGLKENIRVRRAGYAYRRIFQKFLQRYAILTKATWPSWQGEEKQGVLHLLQSVNMDSDQFQLGRSKVFIKAPESLFLLEEMRERKYDGYARVIQKSWRKFVARKKYVQMREEASDLLLNKKERRRNSINRNFIGDYIGMEEHPELQQFVGKREKIDFADTVTKYDRRFKGVKRDLLLTPKCLYLIGREKVKQGPDKGLVKEVLKRKIEIERILSVSLSTMQDDIFILHEQEYDSLLESVFKTEFLSLLAKRYEEKTQKQLPLKFSNTLELKLKKENWGPWSAGGSRQVQFHQGFGDLAVLKPSNKVLQVSIGPGLPKNSRPTRRNTTQNTGYSSGTQNANYPVRAAPPPPGYHQNGVIRNQYVPYPHAPGSQRSNQKSLYTSMARPPLPRQQSTSSDRVSQTPESLDFLKVPDQGAAGVRRQTTSRPPPAGGRPKPQPKPKPQVPQCKALYAYDAQDTDELSFNANDIIDIIKEDPSGWWTGRLRGKQGLFPNNYVTKI

SEQ ID NO: 84 - DNA, 6152 bp, homo sapiens
cgcgctgccccctttaccccgggccgcgccccggggccccgcactgacggcccatggcgccgccagccgcccgcctcgccctgctctccgccgcggcgctcacgctggcggcccggcccgcgcctagccccggcctcggccccggacccgagtgtttcacagccaatggtgcggattataggggaacacagaactggacagcactacaaggcgggaagccatgtctgttttggaacgagactttccagcatccatacaacactctgaaataccccaacggggaggggggcctgggtgagcacaactattgcagaaatccagatggagacgtgagcccctggtgctatgtggcagagcacgaggatggtgtctactggaagtactgtgagatacctgcttgccagatgcctggaaaccttggctgctacaaggatcatggaaacccacctcctctaactggcaccagtaaaacgtccaacaaactcaccatacaaacttgcatcagtttttgtcggagtcagaggttcaagtttgctgggatggagtcaggctatgcttgcttctgtggaaacaatcctgattactggaagtacggggaggcagccagtaccgaatgcaacagcgtctgcttcggggatcacacccaaccctgtggtggcgatggcaggatcatcctctttgatactctcgtgggcgcctgcggtgggaactactcagccatgtcttctgtggtctattcccctgacttccccgacacctatgccacggggagggtctgctactggaccatccgggttccgggggcctcccacatccacttcagcttccccctatttgacatcagggactcggcggacatggtggagcttctggatggctacacccaccgtgtcctagcccgcttccacgggaggagccgcccacctctgtccttcaacgtctctctggacttcgtcatcttgtatttcttctctgatcgcatcaatcaggcccagggatttgctgttttataccaagccgtcaaggaagaactgccacaggagaggcccgctgtcaaccagacggtggccgaggtgatcacggagcaggccaacctcagtgtcagcgctgcccggtcctccaaagtcctctatgtcatcaccaccagccccagccacccacctcagactgtcccaggatggacagtctatggtctggcaactctcctcatcctcacagtcacagccattgtagcaaagatacttctgcacgtcacattcaaatcccatcgtgttcctgcttcaggggaccttagggattgtcatcaaccagggacttcgggggaaatctggagcattttttacaagccttccacttcaatttccatctttaagaagaaactcaagggtcagagtcaacaagatgaccgcaatccccttgtgagtgactaaaaaccccactgtgcctaggacttgaggtccctctttgagctcaaggctgccgtggtcaacctctcctgtggttcttctctgacagactcttcccctcctctccctctgcctcggcctcttcggggaaaccctcctcctacagactaggaagaggcaccctgctgccagggcaggcagagcctggattcctcctgcttcatcgattgcacttaggagagagactcaaagccctggggcccggccctctctgcatctctctctgatctagctagcagtgggggtgtcaggacagtgaggctgagatgacagaggtggtcatggctggcacagggctcaggtacattctagatggctgtcaggtggtgggtagctttagttacattgaatttttcttgcttctctatttttgtccacacacaaatcagtttctcctgatctttatgtcttggaacagggccagacagggagaactctcaggtactcttgggagttggtcccatacaagtgcggactcctggacattagcgaggtgtaaagagggcagtgtctgtgctgccccggcagctttgctctccagatgctggactagggtgggcctccttcagcctgggagggtctgagaataagatctagtgacccccatttatatcaaacctgataccttacacatgggcttctttctagattcttctttccatagctcatggagctgcagggaaagctttaagagctttggtcatataaaacatccattcagctgggcgcgatggctcatgcctgtaatcccagcactgtgggaggctgaggcgggcagatcacctgaggtcaggagttcgagaccagcctggccaacatggtgaaaccccgtctctactaaaaatataaaaattagtcaggcgtggtggcaggcgcctgtaatcccagctactcagaaggctgagacagaagaacagcttgaacccaggaggctgagattgcagtgagccgagatcgcaccactgcactccagcctgggtgacaagagtgagactctgtctcaaaaaaacaaaacacaaataaacaaaaaaaatccattcatttactcatgcaataaattctcctgcaagcttttatgggcactcagtaagtactcaggattggctttatcagccttgccactgagcagctcatggtcctatggaacctgagccaggcctcagtctctccatgattggctcagctaactctcagttcagagtggagagtatcaatcttgtgtttttgcccttaggcagcactatatgagacatggggcctgtggtccttccttctggtgtcccccgtgttaaaagataaaaaacaccccaagggccgggcgcggtggctcatgcctgtaatcccagcactttgggaggctgaggcgggtggatcacgaggtcaggtgatcgaaaccatcctggctaagatggtgaaaccccgtctctactaaaaatacaaaaaattagctgggtgtggtggtgggcgcctgtagtcccagctgctcgggaggctgaggcaggagaatggcgtgaacccgggaggcggagcttgcagtgagcagagatcacgccactgcactccagcctgggtgacagtgcaagactctgtctcaaaaaaaaaaaaaacactccaagggccatccgtgctctctgcccctcctgtggggaccaagtggggttaggaatggctcagtggggaaggagagcactcttgtccccagtcccttgccaccctgtcccttagatagggaggtgggctgcagagattggtgccagaagagggtgggtttgggaattggagctcctccaaggagctcctcctaagattgagtgctgcagctgtagtggctgctggttgggagagtaagtgccatcactaatttaaaagtccttgccatctggaatcaggctttgtcaacagcagctgagaaaagcagcctgtgcctctgctggccaggcctaggccctcgtcagagcgtgcctctccacaaggcacttgggcctgggtgattgttgcgcctctggctttggcgtttcctctttgcagcactttgcctacctcccccaagccctgagccactgcctgctggggctcctactgaggttctggaaacacctctgcacctgccgcccctgggaggaaagagggccacacaggaagtgtctgcagggagaggtggcactcggcagcctgagttcaggagaggtgcttggagcttcaggcagaggggccttcagaggagggaaacggagcaatgtgtcacaggcaggcaggggcaggactgccaccccaggccccgtgggaggcctgctgagggcacagagctgctcggtgcagccttcatgctttgatctggaaagagcagctgtccgcaggcctctgtctccaagaggcctgtcacacaggaggaccgctggaaacataccaacacgtgcagtctcccctccaagctattcatgctgtttgtggaatctctctcaaacataagtgtcaggtgtgtgtcgtcccaacgggtcctgtgctgtgaatagatccatgtgcagcacaaagggaatgtggcacgtggccccaggaagagttcacccggccagggggcagttgttcagttgcctggggctgacactgaccactggcctctggggtgtcctgcagcccaaatgcccaccttgccctcctcacatctcagtcaggggaggccatgcccaagccaatgtgctgtcacagcctgcagcgggggcagcacttcctcggagggcctgggaggtgctggggatgccccagcgcttctcttcctgcctcgccctggcatggcccagcgcctctaggatcaacttacgatccgtggagcagccccgggaaacccaaatctggctcaggacagcgtacgggcaggagggctgtaaatcatcccaggctaagcctccgtgggcactggctcctgccgcagcctggctatggactcagttagaaccaggtagaaagtcagcgacaccccacagaaggccactgcggctaggtaaacacctgagaaagaaactgctccagaagagatgacgtgggcttccaggagcatggaggaggtggcacttgaacttttaggaaactccttagatgagataaagtgggggttggaggtggcgaaaagagggtaaccctgggaaagtcagtcagaacccatggcagaagactgcaggagaggcaggggaggggcttcggggaccactgtggacagagctctgaaagcaccctggccaaagcccctcctgaggtgacagagcgtgggaggaggctgcactgggcctgcgtgccatcctcacccctgttccccgctggcgccaggccctgccttcttggtacctgtgccaacaggagagccctcaccagccgatcttgtcactctccgtggtgacagtgtcttggccagctgtggcccctagtttctagcagcgtttctcagtgtccttggcccttctgagaaggcaggcgggaggcacacggtgccctgttcttccccgtttgtccagttgcttgcaaagcagagaatgagtaggagtgaacccgagtgacttcacccgccctgtcccccacgtcaggacaggcttgaggcctctctgggcgtgagcgaggaaaccaggctgctctaacttctgaagagtgggctctggctcaagactccaatcggccagaagcccacagagatcaaagcactagcaagttcagctgtcctggccctcgggtagaacccacgggcgtgcctgggtgcggctccacccacatgccccactgtcagcccaggcaggagccttcctggccgggctcaggatctgcctgcagcccagccaggccatcacccagccccgatgcatcctggcactgcacgcttactcttcacaagcacttatacgcggatggcctccgagaccctgcctccctggtctgctgaggtcaggccaggtctcccacggagccgggcagctccacaccccaccacctggcaccgttaggtttcagatctcccgtgtggtgtttgatgtcggcttttgttcctaccttgggagtttggattgtttcctctggtgtctttgtttaccttcctcactgttctacctcctggccaggtctcagcttagcttccctggtgtggggtgtttttcaagccttccagccacagctgtctcccctcaggctggacggctccggggtgacagggcttcaccctctgcctgcagacccctggtgggcacatctcacaggcttccgtcttgctgagttgggtacggaggcagaagtggggtgtggaggaaagtcagagggaaatctgcttcagaaaggaagggtctttagacacaaagactggaggcccttccccgcccgcacgggagctgccatcgtgggtctcatgcacgtcaagaccttcccacatccaaactcagcttccagcagggattttgactttggatgacaaggctttatttgtaaatatgctcttaatatgcaactttgagaataaaatagaaacatcatgtattttaaaatataagatgaagtgtgacgcactgtatacaatttaatatatatttttagggttttgttatttaagaaaatggaatgtaatggtacttttacaaaagagaaaaaatgttatttttactttctggaaaaaataaatattctcattgttgtagaaagaaaaaaaaaaaaaaa

SEQ ID NO: 85 - protein, 458 aa, homo sapiens
MAPPAARLALLSAAALTLAARPAPSPGLGPGPECFTANGADYRGTQNWTALQGGKPCLFWNETFQHPYNTLKYPNGEGGLGEHNYCRNPDGDVSPWCYVAEHEDGVYWKYCEIPACQMPGNLGCYKDHGNPPPLTGTSKTSNKLTIQTCISFCRSQRFKFAGMESGYACFCGNNPDYWKYGEAASTECNSVCFGDHTQPCGGDGRIILFDTLVGACGGNYSAMSSVVYSPDFPDTYATGRVCYWTIRVPGASHIHFSFPLFDIRDSADMVELLDGYTHRVLARFHGRSRPPLSFNVSLDFVILYFFSDRINQAQGFAVLYQAVKEELPQERPAVNQTVAEVITEQANLSVSAARSSKVLYVITTSPSHPPQTVPGWTVYGLATLLILTVTAIVAKILLHVTFKSHRVPASGDLRDCHQPGTSGEIWSIFYKPSTSISIFKKKLKGQSQQDDRNPLVSD

SEQ ID NO: 86 - DNA, 3646 bp, homo sapiens
ctctccggccgccgccggtgcgggtgctccgctaccggctcctctccgttctgtgctctcttctgctctcggctccccaccccctctcccttccctcctctccccttgcctcccctcctctgcagcgcctgcattattttctgcccgcaggctcggcttgcactgctgctgcagcccggggaggtggctgggtgggtggggaggagactgtgcaagttgtaggggagggggtgccctcttcttccccgctcccttcccccgccaactccttcccctccttctccccctttcccctccccgcccccaccttcttcctcctttcggaaggactggtaacttgtcgtgcggagcgaacggcggcggcggcggcggcggcggcaccatccaggcgggcaccatgggcacgtccgcgctctgggcgctctggctgctgctcgcgctgtgctgggcgccccgggagagcggcgccaccggaaccgggagaaaagccaaatgtgaaccctcccaattccagtgcacaaatggtcgctgtattacgctgttgtggaaatgtgatggggatgaagactgtgttgacggcagtgatgaaaagaactgtgtaaagaagacgtgtgctgaatctgacttcgtgtgcaacaatggccagtgtgttcccagccgatggaagtgtgatggagatcctgactgcgaagatggttcagatgaaagcccagaacagtgccatatgagaacatgccgcatacatgaaatcagctgtggcgcccattctactcagtgtatcccagtgtcctggagatgtgatggtgaaaatgattgtgacagtggagaagatgaagaaaactgtggcaatataacatgtagtcccgacgagttcacctgctccagtggccgctgcatctccaggaactttgtatgcaatggccaggatgactgcagcgatggcagtgatgagctggactgtgccccgccaacctgtggcgcccatgagttccagtgcagcacctcctcctgcatccccatcagctgggtatgcgacgatgatgcagactgctccgaccaatctgatgagtccctggagcagtgtggccgtcagccagtcatacacaccaagtgtccagccagcgaaatccagtgcggctctggcgagtgcatccataagaagtggcgatgtgatggggaccctgactgcaaggatggcagtgatgaggtcaactgtccctctcgaacttgccgacctgaccaatttgaatgtgaggatggcagctgcatccatggcagcaggcagtgtaatggtatccgagactgtgtcgatggttccgatgaagtcaactgcaaaaatgtcaatcagtgcttgggccctggaaaattcaagtgcagaagtggagaatgcatagatatcagcaaagtatgtaaccaggagcaggactgcagggactggagtgatgagcccctgaaagagtgtcatataaacgaatgcttggtaaataatggtggatgttctcatatctgcaaagacctagttataggctacgagtgtgactgtgcagctgggtttgaactgatagataggaaaacctgtggagatattgatgaatgccaaaatccaggaatctgcagtcaaatttgtatcaacttaaaaggcggttacaagtgtgaatgtagtcgtggctatcaaatggatcttgctactggcgtgtgcaaggcagtaggcaaagagccaagtctgatcttcactaatcgaagagacatcaggaagattggcttagagaggaaagaatatatccaactagttgaacagctaagaaacactgtggctctcgatgctgacattgctgcccagaaactattctgggccgatctaagccaaaaggctatcttcagtgcctcaattgatgacaaggttggtagacatgttaaaatgatcgacaatgtctataatcctgcagccattgctgttgattgggtgtacaagaccatctactggactgatgcggcttctaagactatttcagtagctaccctagatggaaccaagaggaagttcctgtttaactctgacttgcgagagcctgcctccatagctgtggacccactgtctggctttgtttactggtcagactggggtgaaccagctaaaatagaaaaagcaggaatgaatggattcgatagacgtccactggtgacagcggatatccagtggcctaacggaattacacttgaccttataaaaagtcgcctctattggcttgattctaagttgcacatgttatccagcgtggacttgaatggccaagatcgtaggatagtactaaagtctctggagttcctagctcatcctcttgcactaacaatatttgaggatcgtgtctactggatagatggggaaaatgaagcagtctatggtgccaataaattcactggatcagagctagccactctagtcaacaacctgaatgatgcccaagacatcattgtctatcatgaacttgtacagccatcaggtaaaaattggtgtgaagaagacatggagaatggaggatgtgaatacctatgcctgccagcaccacagattaatgatcactctccaaaatatacctgttcctgtcccagtgggtacaatgtagaggaaaatggccgagactgtcaaagtactgcaactactgtgacttacagtgagacaaaagatacgaacacaacagaaatttcagcaactagtggactagttcctggagggatcaatgtgaccacagcagtatcagaggtcagtgttcccccaaaagggacttctgccgcatgggccattcttcctctcttgctcttagtgatggcagcagtaggtggctacttgatgtggcggaattggcaacacaagaacatgaaaagcatgaactttgacaatcctgtgtacttgaaaaccactgaagaggacctctccatagacattggtagacacagtgcttctgttggacacacgtacccagcaatatcagttgtaagcacagatgatgatctagcttgacttctgtgacaaatgttgacctttgaggtctaaacaaataatacccccgtcggaatggtaaccgagccagcagctgaagtctctttttcttcctctcggctggaagaacatcaagatacctttgcgtggatcaagcttgtgtacttgaccgtttttatattacttttgtaaatattcttgtccacattctacttcagctttggatgtggttaccgagtatctgtaacccttgaatttctagacagtattgccacctctggccaaatatgcactttccctagaaagccatattccagcagtgaaacttgtgctatagtgtataccacctgtacatacattgtataggccatctgtaaatatcccagagaacaatcactattcttaagcactttgaaaatatttctatgtaaattattgtaaactttttcaatggttgggacaatggcaataggacaaaacgggttactaagatgaaattgccaaaaaaatttataaactaattttgtacgtatgaatgatatctttgacctcaatggaggtttgcaaagactgagtgttcaaactactgtacattttttttcaagtgctaaaaaattaaaccaagcagcttaaccatgaaaaaaaaaa

SEQ ID NO: 87 - protein, 873 aa, homo sapiens
MGTSALWALWLLLALCWAPRESGATGTGRKAKCEPSQFQCTNGRCITLLWKCDGDEDCVDGSDEKNCVKKTCAESDFVCNNGQCVPSRWKCDGDPDCEDGSDESPEQCHMRTCRIHEISCGAHSTQCIPVSWRCDGENDCDSGEDEENCGNITCSPDEFTCSSGRCISRNFVCNGQDDCSDGSDELDCAPPTCGAHEFQCSTSSCIPISWVCDDDADCSDQSDESLEQCGRQPVIHTKCPASEIQCGSGECIHKKWRCDGDPDCKDGSDEVNCPSRTCRPDQFECEDGSCIHGSRQCNGIRDCVDGSDEVNCKNVNQCLGPGKFKCRSGECIDISKVCNQEQDCRDWSDEPLKECHINECLVNNGGCSHICKDLVIGYECDCAAGFELIDRKTCGDIDECQNPGICSQICINLKGGYKCECSRGYQMDLATGVCKAVGKEPSLIFTNRRDIRKIGLERKEYIQLVEQLRNTVALDADIAAQKLFWADLSQKAIFSASIDDKVGRHVKMIDNVYNPAAIAVDWVYKTIYWTDAASKTISVATLDGTKRKFLFNSDLREPASIAVDPLSGFVYWSDWGEPAKIEKAGMNGFDRRPLVTADIQWPNGITLDLIKSRLYWLDSKLHMLSSVDLNGQDRRIVLKSLEFLAHPLALTIFEDRVYWIDGENEAVYGANKFTGSELATLVNNLNDAQDIIVYHELVQPSGKNWCEEDMENGGCEYLCLPAPQINDHSPKYTCSCPSGYNVEENGRDCQSTATTVTYSETKDTNTTEISATSGLVPGGINVTTAVSEVSVPPKGTSAAWAILPLLLLVMAAVGGYLMWRNWQHKNMKSMNFDNPVYLKTTEEDLSIDIGRHSASVGHTYPAISVVSTDDDLA

SEQ ID NO: 88 - DNA, 7218 bp, homo sapiens
gccccgcatcgtgcccggccccgtcgcggagatcccggacgaccgtcgcgggttgatggtcgcattccagatgtaaacagcttcagaagcctgacggtcatatggtagaatcactgtggactgagacccacctttctagacctgaagcccaggaggaggaagaggaggctggttggtaccatgggcataatgctctgaatcctagtctctcacctagtatgtgagcagtccctgcagatggcccatttggagatcttgacaaagcctcttctgtttccaatggggtttttggcgcattctcacagacttagatgaaactgtgatggccaccgcagggggcaggtgctgacatcgtccccagccctgtggctgttcatccggacatcatttccaacctcaatatctaaatgccacagtgctcttggagcaagttgggctggggaccactgttgccttttaagaccataaaaccatgggaaacgcagaaagtcaacatgtagagcacgagttttatggagaaaagcatgccagcctggggcgcaagcacacttcccgctccctgcgcctctcgcacaagacgcggaggaccaggcacgcttcctcggggaaggtgatccacaggaactccgaagtgagcacccgatccagcagcacccccagcatcccccagtccctggctgaaaatggcctggagcccttctcccaagatggtaccctagaagacttcgggagccccatctgggtggaccgagtggacatgggcttgagacctgtgtcttacactgactcttctgtcactcccagcgtagacagcagcatcgtcctcacagcagcctctgtgcagagcatgccagacactgaggagagcaggctttacggggatgacgctacatatttggctgagggaggcaggaggcagcattcctatacatccaatgggcccactttcatggagacggcgagctttaagaagaaacgctccaaatctgcagacatctggcgggaggacagcctggaattctcactctctgatctgagccaagaacatttaacaagcaacgaagaaatcttgggttccgccgaagagaaggactgcgaggaggctcgggggatggaaacgcgggcgagtccgcggcagctcagcacctgtcagagagccaattccttgggtgacttgtatgctcagaaaaactctggagtgacagcaaacggggggccggggagcaaatttgcaggctactgtcggaatttggtgtctgatattcccaatcttgcaaaccataagatgccaccagctgctgctgaagagactcctccgtacagtaattataacacacttccctgtaggaaatctcactgtctctctgaaggtgccaccaacccacaaattagccatagcaacagcatgcaaggcagaagagctaaaacaactcaggatgttaatgcaggcgagggcagtgagtttgcagacagtgggattgaaggggccactaccgacacggacctcctgtccaggcgatctaatgccaccaactccagctactcacccaccacaggccgggcctttgtgggcagcgacagcggcagcagctccaccggggatgcggctcgtcagggggtgtacgagaacttccggcgggagctggagatgagcaccaccaacagcgagagcctggaggaggccggctcggcgcacagcgatgagcagagcagcggcaccctgagctctccgggccagtcggacatcctgctgaccgccgcacagggcacggtgcgcaaggccggcgccctggccgtcaagaacttcctggtgcacaagaagaacaagaaggtggagtcagccacccggaggaagtggaagcactactgggtgtccctgaaaggatgcacgctatttttctacgagagcgacggcaggtctgggatagaccacaacagcatccccaaacacgccgtctgggtggagaacagcattgtgcaggcggtgcctgagcaccccaagaaggactttgtcttctgcctcagcaattccctgggtgatgccttcctttttcagaccactagccagacggagcttgaaaactggatcaccgccatccactctgcctgcgccactgcggtcgcgaggcaccaccacaaggaagacacgctccgactcctgaaatcagagatcaaaaaactggaacagaagattgacatggatgaaaagatgaagaaaatgggtgaaatgcagctgtcttcagtcactgactcaaagaaaaagaaaacaatattagatcagatctttgtctgggagcaaaatctcgagcagttccaaatggacctgtttcgtttccgctgttatttagccagccttcagggtggggagctgccaaaccccaaaaggcttctcgcttttgcaagtcgaccaacgaaagtggccatgggccgccttggaatcttttcggtatcatcgtttcatgccctggtggcagcacgcactggtgaaactggagtgagaagacgtactcaggccatgtccagatccgcgagcaagcgaaggagcaggttttcttctctgtggggtctggatactacctccaaaaagaagcagggacggccaagcatcaatcaggtgtttggagagggaaccgaagctgtaaagaaatctttagagggaatatttgatgacattgttccagatggcaagagggagaaagaagtggtcttacctaacgttcaccagcacaaccctgactgcgacatttgggtccacgagtatttcactccatcctggttctgtctgcccaataatcagcctgccctgacggtcgtccggccaggcgacactgcacgggacaccctggagctgatttgcaagacacatcaactggatcattctgctcattacctgcgcctgaaatttctaatagaaaacaaaatgcagctctatgttccacagcccgaggaagacatctatgagctgctgtacaaagaaattgaaatctgtccaaaagtcactcagagcatccacattgagaagtcagatacagctgctgatacttacgggttttcactttcttctgtggaagaagatggtattcgaaggctgtacgtgaatagtgtgaaggaaaccggtttagcttccaagaaaggcctgaaagcaggagatgagattcttgagatcaataatcgtgctgctgacgccctgaactcttctatgctcaaagatttcctctcacagccctcgctgggcctcctggtgaggacctaccccgagctggaggaaggagtggagctgctggaaagcccgccccaccgagtggacggccctgccgaccttggcgagagccccctcgcctttctcaccagcaacccagggcacagcctttgcagcgagcagggcagcagtgctgagaccgctccagaggagaccgaggggccagacttggaatcctcagatgagactgatcacagcagcaagagtacagaacaggtggccgcattttgccgcagtttgcatgagatgaacccctctgaccagagcccatctcctcaggactccacggggcctcagctggcgaccatgagacaactctcggatgcagataagctgcgcaaggtgatctgcgagctcctggagacggagcgcacctacgtgaaggatttaaactgtcttatggagagatacctaaagcctcttcaaaaagaaacttttctcacccaggatgagcttgacgtgctttttggaaatttaacggaaatggtagagtttcaagtagaattccttaaaactctagaagatggagtgagactggtacctgatttggaaaagcttgagaaggttgatcaatttaagaaagtgctgttctctctggggggatcattcctgtattatgctgaccgcttcaagctctacagtgccttctgcgccagccacacaaaagttcccaaggtcctggtgaaagccaagacagacacggctttcaaggcattcttggatgcccagaacccgaagcagcagcactcatccacgctggagtcgtacctcatcaagcccatccagaggatcctcaagtacccacttctgctcagggagctgttcgccctgaccgatgcggagagcgaggagcactaccacctggacgtggccatcaagaccatgaacaaggttgccagtcacatcaatgagatgcagaaaatccatgaagagtttggggctgtgtttgaccagctgattgctgaacagactggtgagaaaaaagaggttgcagatctgagcatgggagacctgcttttgcacactaccgtgatctggctgaacccgccggcctcgctgggcaagtggaaaaaggaaccagagttggcagcattcgtcttcaaaactgctgtggtccttgtgtataaagatggttccaaacagaagaagaaacttgtaggatctcacaggctttccatttatgaggactgggaccccttcagatttcgacacatgatccccacggaagcgctgcaggttcgagctttggcgagtgcagatgcagaggcaaatgccgtgtgtgaaattgtccatgtaaaatccgagtctgaagggaggccggagagggtctttcacttgtgctgcagctccccagagagccgaaaggatttcctaaaggctgtgcattcaatcctgcgtgataagcacagaagacagctcctcaaaaccgagagccttccctcatcccagcaatatgtcccttttggaggcaaaagattgtgtgcactgaagggggccaggccggccatgagcagggcagtgtctgccccaagcaagtctcttgggaggaggaggcggcggctggctcgaaacaggtttaccattgattctgatgccgtctccgcaagcagcccggagaaagagtcccagcagccccccggtggtggggacactgaccgatgggtagaggagcagtttgatcttgctcagtatgaggagcaagatgacatcaaggagacagacatcctcagtgacgatgatgagttctgtgagtccgtgaagggtgcctcagtggacagagacctgcaggagcggcttcaggccacctccatcagtcagcgggaaagaggccggaaaaccctggatagtcacgcgtcccgcatggcacagctcaagaagcaagctgccctgtcggggatcaatggaggcctggagagcgcaagcgaggaagtcatttgggttaggcgtgaagactttgccccctccaggaaactgaacactgagatctgactgcgtcacctgccccgtagagaatgtgtgtagatacttcctgccctaactctgcccaccctcctgtaccgtcgacaagaatgtccccttaggtcgcgctcttgcacacacggttttggcagctgacttggttctgaagccatgtagccacccaactttgtcattttcaacaacatcagaaagaattgatcagaatcccaaataagcttgagtcctatcttctgtatattactaagggcttttatttattctcaataaatcagggcctgaacaattaaaagaaaaaagattctatagcactggaaagcaaatcaccccaggagttaacggatgtacaacagattaatttaagggatagtagcacacacacgatccttctatctgaaatcagtctcctagctggggaaacctctttcacacacaaaatgaaatgtgtacagcttgccgtgttctgactgtacccttccctcttccatgtctgagaatctccgtgtattttaagaatgtgtgaggagagggtggcgattcatgtttcaatgagcctctttttttttttccttcctgttttggtctatggctggtcttactctgtgtccatgttcggaagctctagttttgcatagaattatagagatgccaaactctttgaaaagagatccaaatttatcgcttgagagaaagaaaagaaacactattttttgtattttacctgagatacaggggcacaaatagatgagaattttacagtgttagtgtatgtatccctgagcctaaaaaatgaggatataaccttttacagagagagtgaggcgtggtggttttatatttatatatgaaaggccagcaagctcatgcgaaggatatacttttcttccaaaaagcggattttttttttttaatgtttgaatctatatttgagatgggagtttggttggattaaacatgacaccccggtgggcggtgtgtgtgtctgttgcacatggcagggaggggagcctccttctcatggggttgccatggtgatcattggtttttccatcaaaattgcatcttcatccatagattaccttccccttccctgacagtccataaccaaacctttaaacagaacaacctctttaaaaacttctcttgtgtttaacactttcttcatgccaacgaaacagggtaaacatgctcaaaacattaacagtctaaacagatatccaaatactaagaagaaaaacaagttatagcactttcaattttttttttttttttaaaaaaaggtttatagctttttcttttcccatgtcacaatgtccacttcctaagaagggtttaaaatactatgaaaactttctttttggggaaaatatctatttggtgtttgacacatcagtaggtactttaaagacctgaattttatagtagctttaggagttatattttataaaaatcagttatgactttatatttccagacaatagagagttcagtacatcatgctcttgtgcctctgcctgcttttcctgcgttcccaccctgtattccccccgcctttcgggtttccagggcttcgagcttgatcttttgaaagttttattctattaaatttttgctatatcttctggttttctgaaaaagctttagaatggtttctataccctttgtatcactgcatttttccatatcatctccggttcgatcgcgtccagatggaaaacggaagcagaggcttctaatcgtcgcatttactggctccagtgcaacacatccatctgaaaacactcggaagtctggtgcttggagagggtgccattgtctcttgtacataaggtcatgacgtgtctatgtcaaaagttcttatatatttcttttataagctgaaagaaggtctatttttatgtttttaggtctatgaatggaacgttgtaaatgcttgtcaaacaataaaaataacgaaaagtgaaaaaaaaaaaaaaaaaaaa

SEQ ID NO: 89 - protein, 1591 aa, homo sapiens
MGNAESQHVEHEFYGEKHASLGRKHTSRSLRLSHKTRRTRHASSGKVIHRNSEVSTRSSSTPSIPQSLAENGLEPFSQDGTLEDFGSPIWVDRVDMGLRPVSYTDSSVTPSVDSSIVLTAASVQSMPDTEESRLYGDDATYLAEGGRRQHSYTSNGPTFMETASFKKKRSKSADIWREDSLEFSLSDLSQEHLTSNEEILGSAEEKDCEEARGMETRASPRQLSTCQRANSLGDLYAQKNSGVTANGGPGSKFAGYCRNLVSDIPNLANHKMPPAAAEETPPYSNYNTLPCRKSHCLSEGATNPQISHSNSMQGRRAKTTQDVNAGEGSEFADSGIEGATTDTDLLSRRSNATNSSYSPTTGRAFVGSDSGSSSTGDAARQGVYENFRRELEMSTTNSESLEEAGSAHSDEQSSGTLSSPGQSDILLTAAQGTVRKAGALAVKNFLVHKKNKKVESATRRKWKHYWVSLKGCTLFFYESDGRSGIDHNSIPKHAVWVENSIVQAVPEHPKKDFVFCLSNSLGDAFLFQTTSQTELENWITAIHSACATAVARHHHKEDTLRLLKSEIKKLEQKIDMDEKMKKMGEMQLSSVTDSKKKKTILDQIFVWEQNLEQFQMDLFRFRCYLASLQGGELPNPKRLLAFASRPTKVAMGRLGIFSVSSFHALVAARTGETGVRRRTQAMSRSASKRRSRFSSLWGLDTTSKKKQGRPSINQVFGEGTEAVKKSLEGIFDDIVPDGKREKEVVLPNVHQHNPDCDIWVHEYFTPSWFCLPNNQPALTVVRPGDTARDTLELICKTHQLDHSAHYLRLKFLIENKMQLYVPQPEEDIYELLYKEIEICPKVTQSIHIEKSDTAADTYGFSLSSVEEDGIRRLYVNSVKETGLASKKGLKAGDEILEINNRAADALNSSMLKDFLSQPSLGLLVRTYPELEEGVELLESPPHRVDGPADLGESPLAFLTSNPGHSLCSEQGSSAETAPEETEGPDLESSDETDHSSKSTEQVAAFCRSLHEMNPSDQSPSPQDSTGPQLATMRQLSDADKLRKVICELLETERTYVKDLNCLMERYLKPLQKETFLTQDELDVLFGNLTEMVEFQVEFLKTLEDGVRLVPDLEKLEKVDQFKKVLFSLGGSFLYYADRFKLYSAFCASHTKVPKVLVKAKTDTAFKAFLDAQNPKQQHSSTLESYLIKPIQRILKYPLLLRELFALTDAESEEHYHLDVAIKTMNKVASHINEMQKIHEEFGAVFDQLIAEQTGEKKEVADLSMGDLLLHTTVIWLNPPASLGKWKKEPELAAFVFKTAVVLVYKDGSKQKKKLVGSHRLSIYEDWDPFRFRHMIPTEALQVRALASADAEANAVCEIVHVKSESEGRPERVFHLCCSSPESRKDFLKAVHSILRDKHRRQLLKTESLPSSQQYVPFGGKRLCALKGARPAMSRAVSAPSKSLGRRRRRLARNRFTIDSDAVSASSPEKESQQPPGGGDTDRWVEEQFDLAQYEEQDDIKETDILSDDDEFCESVKGASVDRDLQERLQATSISQRERGRKTLDSHASRMAQLKKQAALSGINGGLESASEEVIWVRREDFAPSRKLNTEI

SEQ ID NO: 90 - DNA, 7597 bp, homo sapiens
gagacagtaaggagccaggggaacagagagaattgtggggcagcaccgctccttgggtccccactccccatttctcattgcttggaaatccatgccaagatgcctgccttccttggtctaaagtgtctggggaaattgtgcagctctgagaaaagcaaagtcacctcatctgagagaaccagtgccaggggctcgaacagaaagagactgattgttgaggaccggagggtctctgggacctccttcaccgctcataggcgtgccactatcactcatttgctgtatctctgtcccaaggactactgcccacgtgggcgtgtatgtaacagcgttgatccttttgtggcccaccctcaggaccctcaccacccatcagagaagcctgtcattcactgccataaatgtggggagccttgcaagggtgaagtgcttcgggtccagaccaaacatttccacatcaagtgtttcacctgcaaagtgtgtggctgtgacctggcacaagggggcttcttcataaagaacggagagtatctctgcaccctggactaccagcggatgtacgggacacgctgccatggctgtggggagttcgtggagggcgaagtggtgactgctctgggcaagacctaccatcccaattgctttgcttgtactatctgcaagcgcccgtttccacccggagaccgagtcacattcaatgggagagactgcctttgtcaactctgtgcacagccgatgtcgtccagtccgaaagaaaccaccttctccagcaattgtgccggctgcggaagagatatcaagaatgggcaggcgctgctggcgctggataagcagtggcacttggggtgctttaaatgcaagtcctgcgggaaggtcctcaccggggagtacatcagcaaggatggtgctccgtactgtgaaaaggactaccagggactctttggggtgaaatgtgaggcgtgtcaccagtttatcacagggaaagtcctggaggcaggtgacaaacattaccaccccagctgtgcacgatgcagcagatgcaaccagatgttcacagaaggagaggaaatgtatcttcaaggctccaccgtttggcatcccgactgtaagcaatctacgaagaccgaggaaaagctgcggcctaccaggacatcctcggaaagtatttattctaggccaggctccagtattcctggctcaccaggtcatactatctatgcaaaagtagacaatgagatcctggattacaaggatttagcagccattccgaaggtcaaggcaatttatgacattgaacgtccagatcttattacctatgagcctttctacacttcgggctatgatgacaaacaggagagacagagccttggagagtctccgaggactttgtctcctactccatcagcagaagggtaccaggatgttcgggatcggatgatccatcggtccacgagccagggctccatcaactcccctgtgtacagccgccacagctacactccaaccacgtcccgctctccccagcatttccacagacctggcaatgagccgtccagcggccggaactcccctctcccttaccggccagacagccgccctctaactccaacttacgctcaggcccctaaacatttccatgttccagatcaaggaatcaacatttaccgaaagccacccatctacaaacagcatgctgccttggcagcccagagcaagtcctcagaagatatcatcaagttttccaagttcccagcagcccaggcaccagaccccagcgagacaccaaagattgagacggaccactggcctggtcccccctcatttgctgtcgtaggacctgacatgaaacgcagatctagtggcagagaggaagatgatgaggaacttctgagacgtcggcagcttcaagaagagcaattaatgaagcttaactcaggcctgggacagttgatcttgaaagaagagatggagaaagagagccgggaaaggtcatctctgttagccagtcgctacgattctcccatcaactcagcttcacatattccatcatctaaaactgcatctctccctggctatggaagaaatgggcttcaccggcctgtttctaccgacttcgctcagtataacagctatggggatgtcagcgggggagtgcgagattaccagacactcccagatggccacatgcctgcaatgagaatggaccgaggagtgtctatgcccaacatgttggaaccaaagatatttccatatgaaatgctcatggtgaccaacagagggcgaaacaaaatcctcagagaggtggacagaaccaggctggagcgccacttagcccctgaagtgtttcgggaaatctttggaatgtccatacaggagtttgacaggttacctctttggagacgcaacgacatgaagaaaaaagcaaaactcttctaagtcccactcgtgaatggcaattagagaaaggactgacagtggcggtgccccataggatgtcatattgaggcccaaacttgattggagaatttgcaaactaccgtcgctcagcaacaccaaaaagagaaagtctggttaaaacaccatgagtcaaatgtcgggccagccaacagtaacacttgccaagaagcatggcgtagaaatttctatgttccgaaacacagagtagtgtccacatgtgagcttttcacattaccttatgtatacaacaggagctgcgttgttttcttctttttcttttcctttatctgttgtccaacaacagtgctgactgtccggataagagctggcaagtgcccttaggatgccgcatgggaaaaatcggttatcataatttcaaagtataaatatatttattaagtagcgctgcggctaagaaggaagagtgaggggtctgtccatggggtggcagtgatttcacacccgcctttcttgaatggcttcgtgttactcagccgtgccctggcaggaatggaactccatcagggaacagggcagctctgtttgaatggggtgaaaaacagcaaaattaattcttagcaagctccttgttctctactgttcaccgggacctggctggcaaatgacttagctattagtatatttaaaaactgttcaaaagcaaaagagaaggaacaggaatgaaaggaaaccttcccttaactctttctgcttcccatagcaggtctggttcctgctccccgcctaggacaggagctgtctggagctccacctttgcaaagaaaggaaaaacacaaattgcccccagattggcccagtggcatgccattaggtgattttgcataggggccatatcattcatggccaaaaaaaaccaaaaagcaaaaaacaaaaacaagtcccatgtcctactgactctagttcttccagtcgttatcctctgctgtctctctggcatcctatgaatcagatcaagcccatgctgttgttggtttttaaggtttctttcaataataggctaaggaaagacatgtttttctcttttaaatctctgcaactccaaagtagactccttcgaacgtatttaatttggccttttcagctttcttcttgcccagctctgtcgaattcatgggtgtgtgtgcacatgttggtttcactcacccagagtaattttgtgagcatgcatgtgctttttaatttctgcttgaatgtttgtcctgctgtgttgcagcttctaaagacattgtcaccgagtgtgtgtgactcaaagatcaagagtgaggctaaactgcgaccccaacatcacttccttcatggaaaggtgttggcgctgatgtagctcatggaaggatcagactgggaaccacagaggaaggatgaggtgggatgtggaggtcagagcatctcacgagagtccctcaggctctgcaacactagattcgaatatgagcctagggtttccccaacacgtgcgtgcatatgaaaccacatcatgattcccgacgtgagttagatgagggagagtttgtgtaactccacacccaggagggtaagccactttattatcatgctttggggctgtgcttaagaatttaagctctgttttaaagccgaagaagaaaacatttgaatttaccttcatatgccactaagaacaaaagctctgaagttcttcctgctggcaccaaatattaggattacaagctgtctctctgacaccagtggtaaaaaagcaagtagaatagtttctgagtctgtgttgcagcctctgacacgtggctcaccgctgtcatttgggggatggaatgaacagtcactgttctatagcatcctcctgtgctcttacctaaggaatctaaattgtcctagccttccattgctatgcactgaatgaggactactctcgtgtgtgtgtgtgtgtgtgtgtgtgtgtgtgtgtgtgtgtgtgtgtgtgttggatctactaacatgtttagcaaatggctctgacagggtggccatgagcagatgagaccagctcttgcttggttggaagccacactgcagtttgcagtttagcctttggtgtctcagtggcttcttgcttattccatgctttttctatcccatcctctctctgtgccctcctgcaatggcagccttggcacaatgcctgggtgtcctcatccttgctttactctggaaagtgtggggatggagaggatggtgcatttccagtgcttccttacctgtcaataacaatggtggccacctgggtcccagcacttggctggtggagagatttttttcattatggagctaataaagggtccctacgttttacattgattaatgaattatcacccagacatgtgcagatgaaatgtcaatataagaaaaatcaaggtatttgggaaacatgggcataatcaggtagttttgctaaaattcctcttccttggtctacataaagaagacatgggtctgtcatagaatggggacattagactgaaaactgggacaacccccttccttattttatagagactaggagttaaggggcctgcctaagattgcagtgataaagaactgaaccctaaatcagctcccactaatgaaaccctgctttccttgtatcttttaaactcagttctgcatccaacttgagaagaaaaaaagcttctttccatatcaagtaccatatgagttcatttaaactgcaccttgcagaaatgcattgccagaaagcaccagtagcctcctatctgcaagcagagtagtgctctgctctggggaggggtcattggaaaccataatgcagagtgggccccctactccatttcccagcaaaaggctccagctggagggatgggttgtggggcaacctggttcctgctaactgccagattgaatgtgtgggctagaatgcctgcacatttagttaaactgggctcagcatgcttgtcctcaaaatgtccatcctggtcacagcacacaagatggctattggtctgcttttaccctaccctgtactatacatgaaaattccagttattaacacactcaaactggtggagcttgttcaccctaggaaggggattgtatatatggcaggcttccctggtgccgatgtaaagggctacatttgggaacatttgacttccttgggactcttaagtgcataatgatggcatgaagtaaaaggggcctcaatgatgataggaaaatcagttcttttaaaatttcttcaagaaaatccaggctatcacatagtctttctgtgtgacttattaggagataggaagagcattgggaaacttgcacagctagctatgcatctacattttggtttggggttagttatgaaatgttcttaatatgacgtgttcaataacttcacataaacttcctgttctccaaaacctcaaagagatagagttaatgagttgttgtttttttttaaatgggggtagttttctatctgtcatgggctctagcatctactccgctacccaattctgtcatctccaagctgagtttcctcttctgaggcagaggctggagcagttctttttcagttctcatcctctccatcccaatccagtatatcaatcaactctaactcggagacgtctagctggcaatgtttctaaaactttcactggatttctttagacattgaagcaaacatttttttctaagaattgcttctcagatgatgatatcaaatgtatatgcttttgcaagtttgaaaagttcaaattaaccacttttgactaggtaagtctttctaaaaaccatttaaagctaactgggtcttagcatcctcctgtgtatggaagagacaggtgaccgctccaggttgggtgctcacagaacccttttcctgactctcatggaagatggtggaaggaaaatagactgtctcatcaaccctcctgtgtcctctgaagcaatctcagtttttattaaccacctcttctgtgtttctggtagctatttaacctgtatttaatctgtacttcctatgccagcctcaattttatttgatttttacaattattctcttctaaccaatgaagtgtttgtcagtatgccccaaagcttgctcttttgtgctcccttttgaataactttctatccagaaaaagagattatttgggacttgagatttgcagtgataccaacttatagcaatgatgtactttaagggaactacccaactatgttgtgatagaagaaagagaaaccttcactttggcatttttttttaatcactgtttatttttctgtttgcggcccaggaagcagtgggaggtggtggcagatatgctttgcatatggattgttatgtttttatttgggcaagtttaatcatggaaaactcaaaaagaaggggggaaatggtcagtttaagccaaaagaaactttctaaacaatgtataggtacacagcaaaattaaacaaatccaacaatttctgaagcttagtgtaattgagtggtggttgttattcaataaaattattcccaaaagtgtttctcctaagagtgcagttcccatgagtcacttcctgaacccattgaccaaaggtggacagagacaatcctgtagaccttgacattcagaaagatgtgagctgcttactgatcatatatgcatacgtttctttacagcagaggaaaccattgtccacaaaactgatgttcttttggggttttatgtacagacttgtccaatcatgtgtgtggttcctgcgagttgctgatgactccgcattgaagctctctgagttctttgattttaagttgggtttatggaattttttcaaatgttggaaggtgtgtggttcttcctgccctccctccccttttggaaatatgaaagcaaatgtttagaagaattccttttgaaaagctgtgtcgtgttccctgtgaaactgagcaggtgtgtgttggcgcgctaagtgccacatgcttgtgtgtagaggaggaggtggccctgccggctccgcgctgctgtgcctgtgatccctacctgctccccgctcctgttgccagcagcactcactgcactcctttgtcatatactctgcatcactgtcatactcacaacttcgtgaataaagttgtgtgctttattcgtagaaaaaaaaaaaa

SEQ ID NO: 91 - protein, 778 aa, homo sapiens
MPAFLGLKCLGKLCSSEKSKVTSSERTSARGSNRKRLIVEDRRVSGTSFTAHRRATITHLLYLCPKDYCPRGRVCNSVDPFVAHPQDPHHPSEKPVIHCHKCGEPCKGEVLRVQTKHFHIKCFTCKVCGCDLAQGGFFIKNGEYLCTLDYQRMYGTRCHGCGEFVEGEVVTALGKTYHPNCFACTICKRPFPPGDRVTFNGRDCLCQLCAQPMSSSPKETTFSSNCAGCGRDIKNGQALLALDKQWHLGCFKCKSCGKVLTGEYISKDGAPYCEKDYQGLFGVKCEACHQFITGKVLEAGDKHYHPSCARCSRCNQMFTEGEEMYLQGSTVWHPDCKQSTKTEEKLRPTRTSSESIYSRPGSSIPGSPGHTIYAKVDNEILDYKDLAAIPKVKAIYDIERPDLITYEPFYTSGYDDKQERQSLGESPRTLSPTPSAEGYQDVRDRMIHRSTSQGSINSPVYSRHSYTPTTSRSPQHFHRPGNEPSSGRNSPLPYRPDSRPLTPTYAQAPKHFHVPDQGINIYRKPPIYKQHAALAAQSKSSEDIIKFSKFPAAQAPDPSETPKIETDHWPGPPSFAVVGPDMKRRSSGREEDDEELLRRRQLQEEQLMKLNSGLGQLILKEEMEKESRERSSLLASRYDSPINSASHIPSSKTASLPGYGRNGLHRPVSTDFAQYNSYGDVSGGVRDYQTLPDGHMPAMRMDRGVSMPNMLEPKIFPYEMLMVTNRGRNKILREVDRTRLERHLAPEVFREIFGMSIQEFDRLPLWRRNDMKKKAKLF

SEQ ID NO: 92 - DNA, 1479 bp, homo sapiens
actgccccagcctcaggctctgtgcatctcccccgagcccccaccacatatgtgcggaggcccctgggggcccaggcctgtcctcagtcccgactgggctctacctgaggaccctggggagcctgggcctggccctcctcagagcttggggcttccttggtcgcacccaccacctgcctgcccactggtcagccttcagggaccctgagcaccgcctggtctctttcctgtggccagcccagaactgaagcgctgcggcatggcgcgcgcctgcctccaggccgtcaagtacctcatgttcgccttcaacctgctcttctggctgggaggctgtggcgtgctgggtgtcggcatctggctggccgccacacaggggagcttcgccacgctgtcctcttccttcccgtccctgtcggctgccaacttgctcatcatcaccggcgcctttgtcatggccatcggcttcgtgggctgcctgggtgccatcaaggagaacaagtgcctcctgctcactttcttcctgctgctgctgctggtgttcctgctggaggccaccatcgccatcctcttcttcgcctacacggacaagattgacaggtatgcccagcaagacctgaagaaaggcttgcacctgtacggcacgcagggcaacgtgggcctcaccaacgcctggagcatcatccagaccgacttccgctgctgtggcgtctccaactacactgactggttcgaggtgtacaacgccacgcgggtacctgactcctgctgcttggagttcagtgagagctgtgggctgcacgcccccggcacctggtggaaggcgccgtgctacgagacggtgaaggtgtggcttcaggagaacctgctggctgtgggcatctttgggctgtgcacggcgctggtgcagatcctgggcctgaccttcgccatgaccatgtactgccaagtggtcaaggcagacacctactgcgcgtaggccgcccaccgcccgcttctctgccaaaaggacgcccacggggagatggccgcacccacagctgcctttcccaccaccagcctcggtgctctgccccatgctgggaggagggagggagggacaggtgcctggagcccccggaaccctgtttctggaaggccctagctcaggtggcttcagggcctccggaccccccctgggaggggtggccacgtgctggctgcggaacccagggcaggggtgggaggggcctccagcactttttatatttacgtattctccaaagcagtgttcacacgggagccagcctgtggcccccagcctcctggaaaacaggttggcgctggaggagccgggtcttggcatcctggaggtggccccactggtcctggtgctccaggcggggccgtggacccctcacctacattccatagtgggcccgtggggctcctggtgcatcttaataaagtgtgagcagcaaccttgaaaaaaaaaaaaaaaaa

SEQ ID NO: 93 - protein, 238 aa, homo sapiens
MARACLQAVKYLMFAFNLLFWLGGCGVLGVGIWLAATQGSFATLSSSFPSLSAANLLIITGAFVMAIGFVGCLGAIKENKCLLLTFFLLLLLVFLLEATIAILFFAYTDKIDRYAQQDLKKGLHLYGTQGNVGLTNAWSIIQTDFRCCGVSNYTDWFEVYNATRVPDSCCLEFSESCGLHAPGTWWKAPCYETVKVWLQENLLAVGIFGLCTALVQILGLTFAMTMYCQVVKADTYCA

SEQ ID NO: 94 - DNA, 2100 bp, homo sapiens
tttccttccctctccctgggcttgggtctcccacttgtccagacagcggccgggcttgtcacggggctctgtgcagccttttccactctcccggctgccagcgtcccgccccgtcccctcccagcccccaagggaggaggggagagctgcagagaggaggaggggtcggggaggccggctttataaaggcggctggaacaaccctgcccgccagaccccgtcgcccggatcccctgagctgcccgccatcccacgtgaccgcgccgccccccagctccaccgctgagcccgctcgccatggccctcttcggggccctcttcctagcgctgctggcaggcgcacatgcagagttcccaggctgcaagatccgcgtcacctccaaggcgctggagctggtgaagcaggaggggctgcgctttctggagcaagagctggagactatcaccattccggacctgcggggcaaagaaggccacttctactacaacatctctgaggtgaaggtcacagagctgcaactgacatcttccgagctcgatttccagccacagcaggagctgatgcttcaaatcaccaatgcctccttggggctgcgcttccggagacagctgctctactggttcttctatgatgggggctacatcaacgcctcagctgagggtgtgtccatccgcactggtctggagctctcccgggatcccgctggacggatgaaagtgtccaatgtctcctgccaggcctctgtctccagaatgcacgcggccttcgggggaaccttcaagaaggtgtatgattttctctccacgttcatcacctcagggatgcgcttcctcctcaaccagcagatctgccctgtcctctaccacgcagggacggtcctgctcaactccctcctggacaccgtgcctgtgcgcagttctgtggacgagcttgttggcattgactattccctcatgaaggatcctgtggcttccaccagcaacctggacatggacttccggggggccttcttccccctgactgagaggaactggagcctccccaaccgggcagtggagccccagctgcaggaggaagagcggatggtgtatgtggccttctctgagttcttcttcgactctgccatggagagctacttccgggcgggggccctgcagctgttgctggtgggggacaaggtgccccacgacctggacatgctgctgagggccacctactttgggagcattgtcctgctgagcccagcagtgattgactccccattgaagctggagctgcgggtcctggccccaccgcgctgcaccatcaagccctctggcaccaccatctctgtcactgctagcgtcaccattgccctggtcccaccagaccagcctgaggtccagctgtccagcatgactatggacgcccgtctcagcgccaagatggctctccgggggaaggccctgcgcacgcagctggacctgcgcaggttccgaatctattccaaccattctgcactggagtcgctggctctgatcccattacaggcccctctgaagaccatgctgcagattggggtgatgcccatgctcaatgagcggacctggcgtggggtgcagatcccactacctgagggcatcaactttgtgcatgaggtggtgacgaaccatgcgggattcctcaccatcggggctgatctccactttgccaaagggctgcgagaggtgattgagaagaaccggcctgctgatgtcagggcgtccactgcccccacaccgtccacagcagctgtctgagccctcaatccccaagctggcagctgtcattcaggaccccaacccctctcagcccctcttttcccacattcatagcctgtagtgccccctctaacccccagtgccacagagaagacgggatttgaagctgtacccaatttaattccataatcaatctatcaattacagtccgtccaccacctccctgtgggctgtcctgagctctgttgggttcctgggatggaatcagtgcatcataaagggcattctttaagcagagaaggggccaggccaccccattcaggaactgctgcgggaataaagtgctaacttgcccccagg

SEQ ID NO: 95 - protein, 493 aa, homo sapiens
MALFGALFLALLAGAHAEFPGCKIRVTSKALELVKQEGLRFLEQELETITIPDLRGKEGHFYYNISEVKVTELQLTSSELDFQPQQELMLQITNASLGLRFRRQLLYWFFYDGGYINASAEGVSIRTGLELSRDPAGRMKVSNVSCQASVSRMHAAFGGTFKKVYDFLSTFITSGMRFLLNQQICPVLYHAGTVLLNSLLDTVPVRSSVDELVGIDYSLMKDPVASTSNLDMDFRGAFFPLTERNWSLPNRAVEPQLQEEERMVYVAFSEFFFDSAMESYFRAGALQLLLVGDKVPHDLDMLLRATYFGSIVLLSPAVIDSPLKLELRVLAPPRCTIKPSGTTISVTASVTIALVPPDQPEVQLSSMTMDARLSAKMALRGKALRTQLDLRRFRIYSNHSALESLALIPLQAPLKTMLQIGVMPMLNERTWRGVQIPLPEGINFVHEVVTNHAGFLTIGADLHFAKGLREVIEKNRPADVRASTAPTPSTAAV

SEQ ID NO: 96 - DNA, 1038 bp, homo sapiens
atttgaggccatataaagtcacctgaggccctctccaccacagcccaccagtgaccacgaaggctgtgctgcttgccctgttgatggcaggcttggccctgcagccaggcactgccctgctgtgctactcctgcaaagcccaggtgagcaacgaggactgcctgcaggtggagaactgcacccagctgggggagcagtgctggaccgcgcgcatccgcgcagttggcctcctgaccgtcatcagcaaaggctgcagcttgaactgcgtggatgactcacaggactactacgtgggcaagaagaacatcacgtgctgtgacaccgacttgtgcaacgccagcggggcccatgccctgcagccggctgctgccatccttgcgctgctccctgcactcggcctgctgctctggggacccggccagctctaggctctggggggccccgctgcagcccacactgggtgtggtgccccaggcctctgtgccactcctcacacacccggcccagtgggagcctgtcctggttcctgaggcacatcctaacgcaagtctgaccatgtatgtctgcgcccctgtcccccaccctgaccctcccatggccctctccaggactcccacccggcagatcggctctattgacacagatccgcctgcagatggcccctccaaccctctctgctgctgtttccatggcccagcattctccacccttaaccctgtgctcaggcacctcttcccccaggaagccttccctgcccaccccatctatgacttgagccaggtctggtccgtggtgtcccccgcacccagcaggggacaggcactcaggagggcccggtaaaggctgagatgaagtggactgagtagaactggaggacaggagtcgacgtgagttcctgggagtctccagagatggggcctggaggcctggaggaaggggccaggcctcacattcgtggggctccctgaatggcagcctcagcacagcgtaggcccttaataaacacctgttggataagccagaaaaaaaaaaaaaaaa

SEQ ID NO: 97 - protein, 114 aa, homo sapiens
MAGLALQPGTALLCYSCKAQVSNEDCLQVENCTQLGEQCWTARIRAVGLLTVISKGCSLNCVDDSQDYYVGKKNITCCDTDLCNASGAHALQPAAAILALLPALGLLLWGPGQL

SEQ ID NO: 98 - DNA, 1552 bp, homo sapiens
acagactgcagggctgactagggttagtttggaggagggagtaagaggtggggaggaggaggcacagttaatggatctgtaaacttgcaccctctttcagagtggtacatggaagacagcacaaagtggatccatactctgaaatgcagtaactctgatgcttgaatttgtctcccttcttgccagaaaggattctaataactcggtgtcaaagccaagacataaactcaaccccttctcttccaaaagcttcacgttacagcatggaagctgttgccaagtttgatttcactgcttcaggtgaggatgaactgagctttcacactggagatgttttgaagattttaagtaaccaagaggagtggtttaaggcggagcttgggagccaggaaggatatgtgcccaagaatttcatagacatccagtttcccaaatggtttcacgaaggcctctctcgacaccaggcagagaacttactcatgggcaaggaggttggcttcttcatcatccgggccagccagagctccccaggggacttctccatctctgtcaggcatgaggatgacgttcaacacttcaaggtcatgcgagacaacaagggtaattactttctgtggactgagaagtttccatccctaaataagctggtagactactacaggacaaattccatctccagacagaagcagatcttccttagagacagaacccgagaagaccagggtcaccggggcaacagcctggaccggaggtcccagggaggcccacacctcagtggggctgtgggagaagaaatccgaccttcgatgaaccggaagctgtcggatcaccccccgacccttcccctgcagcagcaccagcaccagccacagcctccgcaatatgccccagcgccccagcagctgcagcagcccccacagcagcgatatctgcagcaccaccatttccaccaggaacgccgaggaggcagccttgacataaatgatgggcattgtggcaccggcttgggcagtgaaatgaatgcggccctcatgcatcggagacacacagacccagtgcagctccaggcggcagggcgagtgcggtgggcccgggcgctgtatgactttgaggccctggaggatgacgagctggggttccacagcggggaggtggtggaggtcctggatagctccaacccatcctggtggaccggccgcctgcacaacaagctgggcctcttccctgccaactacgtggcacccatgacccgataaactcttcaggggacagaagctttttgtctggagctgcccacaagaaagagggcaaggaaaaaaggctggactccatgactatatatacatacatctatctacatctgcctgtgtacacacacaactttttatactagtaatttattggcaattgggctggtaattagttgatgcaaaagggaactcaggtggagaataatattgacacttgcttttctgcccccctcaggggtgtgtggaaggcagtgggggagttgggaggggggcagggaaatgaaatggagttttgtcctggc

SEQ ID NO: 99 - protein, 330 aa, homo sapiens
MEAVAKFDFTASGEDELSFHTGDVLKILSNQEEWFKAELGSQEGYVPKNFIDIQFPKWFHEGLSRHQAENLLMGKEVGFFIIRASQSSPGDFSISVRHEDDVQHFKVMRDNKGNYFLWTEKFPSLNKLVDYYRTNSISRQKQIFLRDRTREDQGHRGNSLDRRSQGGPHLSGAVGEEIRPSMNRKLSDHPPTLPLQQHQHQPQPPQYAPAPQQLQQPPQQRYLQHHHFHQERRGGSLDINDGHCGTGLGSEMNAALMHRRHTDPVQLQAAGRVRWARALYDFEALEDDELGFHSGEVVEVLDSSNPSWWTGRLHNKLGLFPANYVAPMTR

SEQ ID NO: 100 - DNA, 1871 bp, homo sapiens
tttgtgcaaataaggtttctgtggtgagacaccagataaactcaacttcctctttcaacaacaaatgtgtcagttatcagcaggatccatgccgccagagtaaagctttctaccctttactccctgcaaagaaacaagagtgcttatcccagctaagctccagggtaatgttatcatgacagcttcaacttttagaccacaggcaaatgctttgttaaaactctatgctggtcattcccttcaggatttggcactcaccaacatacccttctttcaagtgaaaaggcatctcttttaatggtcctgacctttggaataggaagcatgtaccctggacagagcacttcaaactagaggaaccataaatccatggctaaccttgacaaatacactgaaacattcaagatgggtagcaacagtaccagcactgctgagatttactgtaatgtcactaatgtgaaatttcaatactccctctatgcaaccacctatatcctcatattcattcctggtcttctggctaacagtgcagccttgtgggttctgtgccgcttcatcagcaagaaaaataaagccatcattttcatgatcaacctctctgtggctgaccttgctcatgtattatctttacccctccggatttactattacatcagccaccactggcctttccagagagccctttgcctgctctgcttctacctgaagtatctcaacatgtatgccagcatttgtttcctgacgtgcatcagtcttcaaaggtgcttttttctcctcaagcccttcagggccagagactggaagcgtaggtacgatgtgggcatcagtgctgccatctggatcgttgtggggactgcctgtttgccatttcccatcctgagaagcacagacttaaacaacaacaagtcctgctttgctgatcttggatacaagcaaatgaatgcagttgcgttggtcgggatgattacagttgctgagcttgcaggatttgtgatcccagtgatcatcatcgcatggtgtacctggaaaactactatatccttgagacagccaccaatggctttccaagggatcagtgagaggcagaaagcactgcggatggtgttcatgtgtgctgcagtcttcttcatctgcttcactccctatcatattaactttattttttacaccatggtaaaggaaaccatcattagcagttgtcccgttgtccgaatcgcactgtatttccaccctttttgcctgtgccttgcaagtctctgctgccttttggatccaattctttattactttatggcttcagagtttcgtgaccaactatcccgccatggcagttctgtgacccgctcccgcctcatgagcaaggagagtggttcatcaatgattggctaaaattaagatatctctttaattacgcctttgtttacctacgttccttgtctttttccaaaggccagaattgtcaaccaatttctttaattgaacattgtaaaaaacaggaataagtacttttgtgtaatattcacagtcaacaggggtgtgatggtgaaggcagagtgtgaaaaacgtgagagaggaagagaaaatagatttacctgattcctctttaaaattcaagccactttcttatttaagaaacctagatcaagtttttacagatgtaaataaaagttgaatagtttaccttaaatttttttcaataagtaagttattgttaataatgcacagtaaatatgtgaatttttcctagatgtaaaaaaaaaaatctttcatataaagaccttaaattctgaaaaaaaaaaaaaaaaaaaaaaaaaaaaaaaaaaaaaaaaaaaaaaaaaaaaaaaaaaaaaaaaaaaaaaaaaaaaaaaaaa

SEQ ID NO: 101 - protein, 339 aa, homo sapiens
MANLDKYTETFKMGSNSTSTAEIYCNVTNVKFQYSLYATTYILIFIPGLLANSAALWVLCRFISKKNKAIIFMINLSVADLAHVLSLPLRIYYYISHHWPFQRALCLLCFYLKYLNMYASICFLTCISLQRCFFLLKPFRARDWKRRYDVGISAAIWIVVGTACLPFPILRSTDLNNNKSCFADLGYKQMNAVALVGMITVAELAGFVIPVIIIAWCTWKTTISLRQPPMAFQGISERQKALRMVFMCAAVFFICFTPYHINFIFYTMVKETIISSCPVVRIALYFHPFCLCLASLCCLLDPILYYFMASEFRDQLSRHGSSVTRSRLMSKESGSSMIG

SEQ ID NO: 102 - DNA, 10275 bp, homo sapiens
actcccaccctaagtgctgcagactcttccctgaagctgccggctgaggccggagctgccgcctccatgagaggcttcctcctacaccccagggccagaggaccctttgccaccagagtgagatcctagagaccatcatcctggtaaatcccagtgcagacagcatcagctctgaggttcatcatcttcttagcagctcatcagcttataaactactaatcttgagtgggcaaagtttagagcctgggggagacctcatcctacagagtggcacctactcatatgaaaactttgcccaggtccttcacaaccccgagatttcccaattgctcagcaatagagaccctgggatacaggccttccttaccgtgtcctgcttaggggaaggtgattggagccacctgggattatccagttcccaagagaccctgcacctccggctaaaccctgagcccactctgcccaccatggacggcgtggctgagttctccgagtatgtctctgagactgtggacgtgccatccccatttgacctactagagccccccacctcagggggcttcctcaagctctccaagccttgttgctacatcttcccaggtggtcgtggggactctgccctctttgctgtcaatggtttcaacatcctggtggatggtggctctgatcgcaagtcctgtttttggaagctggtacggcacttggaccgcattgactcggtgctactcacacacattggggcagacaacctgccaggcatcaatggactactgcagcgcaaagtggcagagctagaggaggagcagtcccagggctctagcagttacagcgactgggtgaagaaccttatctctcctgagcttggagttgtctttttcaacgtgcctgagaagctgcggcttcctgatgcctcccggaaagccaagcgtagcattgaggaggcctgcctcactctgcagcacttaaaccgcctgggcatccaggctgagcctctatatcgtgtggtcagcaataccattgagccactgaccctcttccacaaaatgggtgtgggccggctggacatgtatgtcctcaaccctgtcaaggacagcaaggagatgcagttcctcatgcaaaagtgggcaggcaatagtaaagccaagacaggcatcgtgctgcccaatgggaaggaggctgagatctccgtgccctaccttacctctatcactgctctggtggtctggctaccagccaatcccactgagaagattgtgcgtgtgctttttccaggaaatgctccccaaaacaagatcttggagggcctagaaaagcttcggcatctggacttcctgcgttaccctgtggccacgcagaaggacctggcttctggggctgtgcctaccaacctcaagcccagcaaaatcaaacagcgggctgatagcaaggagagcctcaaagccactaccaagacggccgtgagcaagttggccaaacgggaggaggtggtagaagagggagccaaggaggcacgttcagagctggccaaggagttagccaagacagagaagaaggcaaaagagtcatctgagaagcccccagagaagcctgccaagcctgagagggtgaagacagagtcaagtgaggcactgaaggcagagaagcgaaagctgatcaaagacaaggtagggaaaaagcaccttaaagaaaagatatcaaagctggaagaaaaaaaagacaaggagaaaaaagagatcaaaaaggagaggaaagagctcaagaaggatgaaggaaggaaggaggagaagaaggatgccaagaaggaggagaagaggaaagataccaaacctgagctcaagaagatttccaagccagacctaaagccctttactcctgaggtacgtaagaccctctataaagccaaggtccctggaagagtcaaaatagacaggagccgtgctatccgtggggagaaggagctgtcttctgagccccagacacccccagcccagaagggaactgtaccactcccaaccatcagtgggcacagggagctggtcctatcctcaccagaggacctcacacaggactttgaggagatgaagcgtgaggagagggctttgctggctgaacaaagggacacaggactaggagataagccattccctctagacactgcagaggagggacccccaagtacagctatccagggaacaccaccctctgttccagggctgggacaagaagaacatgtgatgaaggagaaagagcttgtcccagaggtccctgaggaacaaggcagcaaggacagaggcctagactctggggctgaaacagaggaagagaaagatacctgggaggaaaagaagcagagggaagcagagaggctcccagacagaacagaagccagagaggaaagtgaacctgaagtaaaggaggatgtgatagaaaaggctgagttagaagaaatggaggaggtacacccttcagatgaggaggaagaggacgcgacaaaagctgagggtttttaccaaaaacatatgcaggaacccttgaaggtaactccaaggagccgggaggcttttgggggtcgggaattgggactccagggcaaggcccctgagaaggagacctcgttattcctaagcagcctgaccacacctgcaggagccactgagcatgtctcttacatccaggatgagacaatccctggctactcagagactgagcagaccatctcagatgaggagatccatgatgagccggaggagcgcccagctccacccagatttcatacaagtacatatgacctgcccgggcctgaaggtgctggcccattcgaagccagccaacctgccgatagtgctgttcctgctacctctggcaaagtctatggaacgccagagactgaactcacctaccccactaacatagtggctgcccctttggctgaagaggaacatgtgtcctcggccacttcaatcactgagtgtgacaaactttcttcctttgccacatcagtggctgaggaccaatctgtggcctcacttacagctccccagacagaggagacaggcaagagctccctgctgcttgacacagtcacaagcatcccttcctcccgtactgaagctacgcagggcttggactatgtgccatcagctggtaccatctcacccacctcctcactggaagaagacaagggcttcaaatcaccaccctgtgaggacttctctgtgactggggagtcagagaagagaggagagatcatagggaaaggcttgtctggagagagagctgtggaagaggaagaggaggagacagcaaacgtagagatgtctgagaaactttgcagtcaatatggaactccagtgtttagtgcccctgggcatgccctacatccaggagaaccagcccttggagaagcagaggagcggtgccttagcccagatgacagcacagtgaagatggcttctcctccaccatctggcccacccagtgccacccacacaccctttcatcagtccccagtggaagaaaagtctgagccccaagactttcaggaggcagactcctggggagacactaagcgcacaccaggtgtgggcaaagaagatgctgctgaggagacagtcaagccagggcctgaagagggcacactagagaaggaagagaaagttcctcctcccaggagcccccaggcccaggaagcacctgtcaacattgatgaggggcttacaggctgtaccattcaactgttgccagcacaggataaagcaatagtctttgagattatggaggcaggagagcccacaggcccaattctgggagcagaagcccttcccggaggtttgaggactttaccccaagaacctggcaaacctcagaaagatgaggtgctcagatatcctgaccgaagcctctctcctgaagatgcagaatccctctctgtcctcagcgtgccctccccagacactgccaaccaagagcctacccccaagtctccctgtggcctgacagaacagtacctacacaaagaccgttggccagaggtatctccagaagacacccagtcactttctctgtcagaagagagtcccagcaaggagacctccctggatgtctcttctaagcagctctctccagaaagccttggcaccctccagtttggggaactaaaccttgggaaggaagaaatggggcatctgatgcaggccgaggatacctctcaccacacagctcccatgtctgttccagagccccatgcagccacagcgtcacctcccacagatgggacaactcgatactctgcacagacagacatcacagatgacagccttgacaggaagtcacctgccagctcattctctcactctacaccttcaggaaatgggaagtacttacctggggcgatcacaagccctgatgaacacattctgacacctgatagctccttctccaagagtcctgagtctttgccaggccctgccttggaggacattgccataaagtgggaagataaagttccagggttgaaagacagaacctcagaacagaagaaggaacctgagccaaaggatgaagttttacagcagaaagacaaaactctggagcacaaggaggtggtagagccgaaggatacagccatctatcagaaagatgaggctctgcatgtaaagaatgaggctgtgaaacagcaggataaggctttagaacaaaagggcagagacttagagcaaaaagacacagccctagaacagaaggacaaggccctggaaccaaaagacaaagacttagaagaaaaagacaaggccctggaacagaaggataagattccagaagagaaagacaaagccttagaacaaaaggatacagccctggaacagaaggacaaggccctggaaccaaaagataaagacttggaacaaaaggacagggtcctagaacagaaggagaagatcccagaagagaaagacaaagccttagatcaaaaagtcagaagtgttgaacataaggctccggaggacacggtcgctgaaatgaaggacagagacctagaacagacagacaaagcccctgaacagaaacaccaggcccaggaacaaaaggataaagtctcagaaaagaaggatcaggccttagaacaaaaatactgggctttgggacagaaggatgaagccctggaacaaaacattcaggctctggaagagaaccaccaaactcaggagcaggagagcctagtgcaggaggataaaaccaggaaaccaaagatgctagaggaaaaatccccagaaaaggtcaaggccatggaagagaagttagaagctcttctggagaagaccaaagctctgggcctggaagagagcctagtgcaggagggcagggccagagagcaggaagaaaagtactggagggggcaggatgtggtccaggagtggcaagaaacatctcctaccagagaggagccggctggagaacagaaagagcttgccccggcatgggaggacacatctcctgagcaggacaataggtattggaggggcagagaggatgtggccttggaacaggacacatactggagggagctaagctgtgagcggaaggtctggttccctcacgagctggatggccagggggcccgcccacactacactgaggaacgggaaagcactttcctagatgagggcccagatgatgagcaagaagtacccctgcgggaacacgcaacccggagcccctgggcctcagacttcaaggatttccaggaatcctcaccacagaaggggctagaggtggagcgctggcttgctgaatcaccagttgggttgccaccagaggaagaggacaaactgacccgctctccctttgagatcatctcccctccagcttccccacctgagatggttggacaaagggttccttcagccccaggacaagagagtcctatcccagaccctaagctcatgccacacatgaagaatgaacccactactccctcatggctggctgacatcccaccctgggtgcccaaggacagacccctcccccctgcacccctctccccagctcctggtccccccacacctgccccggaatcccatactcctgcacccttctcttggggcacagccgagtatgacagtgtggtggctgcagtgcaggagggggcagctgagttggaaggtgggccatactcccccctggggaaggactaccgcaaggctgaaggggaaagggaagaagaaggtagggctgaggctcctgacaaaagctcacacagctcaaaggtaccagaggccagcaaaagccatgccaccacggagcctgagcagactgagccggagcagagagagcccacaccctatcctgatgagagaagctttcagtatgcagacatctatgagcagatgatgcttactgggcttggccctgcatgccccactagagagcctccacttggagcagctggggattggcccccatgcctctcaaccaaggaggcagctgccggccgaaacacatctgcagagaaggagctttcatctcctatctcacccaagagcctccagtctgacactccaaccttcagctatgcagccctggcaggacccactgtacccccaaggccagagccagggccaagtatggagcccagcctcaccccacctgcagttcccccccgtgctcctatcctgagcaaaggcccaagcccccctcttaatggtaacatcctgagctgcagcccagataggaggtccccatcccccaaggaatcaggccggagtcactgggatgacagcactagtgactcagaactggagaagggggctcgggaacagccagaaaaagaggcccaatccccaagtcctcctcaccccattcctatggggtcccccacattatggccagaaactgaggcacatgttagccctcccttggactcacacctggggcctgcccgacccagtctggacttccctgcttcagcctttggcttctcctcattgcagccagctcccccacagctgccctctccagctgaaccccgctcggcaccctgtggctcccttgccttctctggggatcgagctctggctctggctccaggaccccccaccagaacccggcatgatgaatacctggaagtgaccaaggcccccagcctggattcctcactgccccagctcccatcacccagttctcctggggcccctctcctctccaatctgccacgacctgcctcaccagccctgtctgagggctcctcctctgaggctaccacgcctgtgatttcaagtgtggcggagcgcttctctccaagccttgaggctgcagaacaggagtctggagagctggacccaggaatggaaccagctgcccacagcctctgggacctcactcctctgagcccagcacccccagcttcactggacttggccctagctccagctccaagcctgcctggagacatgggtgatggcatcctgccgtgccacctggagtgctcagaggcagccacggagaagccaagccccttccaggttccctctgaggattgtgcagccaatggcccaactgaaaccagccctaaccccccaggccctgccccagccaaggctgaaaatgaagaggctgcggcttgccctgcctgggaacgtggggcctggcctgaaggagctgagaggagctcccggcctgacacattgctctcccctgagcagccagtgtgtcctgcagggggctccgggggcccacccagcagtgcctctcctgaggtcgaagctgggccccagggatgtgccactgagcctcggccccatcgtggggagctctccccatccttcctgaacccacctctgcccccatccatagatgatagggacctctcaactgaggaagttcggctagtaggaagaggggggcggcgccgggtaggggggccagggaccactgggggcccatgccctgtgactgatgagacaccccctacatcagccagtgactcaggctcctcacagtcagattctgatgtcccgccagaaactgaggagtgtccgtccatcacagctgaggcagccctcgactcagatgaagatggagacttcctacctgtggacaaagctgggggtgtcagtggtactcaccaccccaggcctggccatgacccacctcctctcccacagccagacccccgcccatcccctccccgccctgatgtgtgcatggctgaccccgaggggctcagctcagagtctgggagagtagagaggctacgggagaaggaaaaggttcaggggcgagtagggcgcagggccccaggcaaggccaagccagcgtcccctgcacggcgtctggatcttcggggaaaacgctcacccacccctggtaaagggcctgcagatcgagcatcccgggccccacctcgaccacgcagcaccacaagccaggtcaccccagcagaggaaaaggatggacacagccccatgtccaaaggcctagtcaatggactcaaggcaggaccaatggccttgagttccaagggcagctctggtgcccctgtatatgtggatctcgcctacatcccgaatcattgcagtggcaagactgctgaccttgacttcttccgtcgagtgcgtgcatcctactatgtggtcagtgggaatgaccctgccaatggcgagccaagccgggctgtgctggatgccctgctggagggcaaggcccagtggggggagaatcttcaggtgactctgatccctactcatgacacggaggtgactcgtgagtggtaccaacaaactcatgagcagcagcaacaactgaatgtcctggtcctggctagcagcagcaccgtggtgatgcaggatgagtccttccctgcctgcaagattgagttctgaaagagccgccctcccttccccaaggatccactcccccagctcctttagagaatggctactgctgagtcctttggggttgagggagatgggagctagggggaggggagggagatgtcttgttgtggggacttgggctgggctaaatgggaggggttgtccctccccatcatccattcctgtgaggtgtctcaaaccaaagttaacagggagaggatgggggaggggacaaattagaataggatagcatctgatgcctgagaaccctctcctagcactgtcaaatgctggtattgaatggggactgaggatgggtctcagagagcaacctcctccctcgtagagggagattatatccccaactccagggacctctttatctcaatctatttatttggcatcctgggagggatttccaatagtaatttatgtgacctggggcaggataccgtcagtgaggtgcccagagctgcaccctttcctccatttcccatcccccatctcctcaaccaccagggtctgagttctagcagggtcctgggggtatcccactgctatactgttctactgcttccctcagtatctgaatgtctcaatttaaaacttgaagctctttagaccaatagactggtgagaggagaaaggagcttatcccccagaccctgctttataccattcacatcccagggctgtgtccagacagcacaaaacggcaaggagagcccaagccccaatgccagaattcttccaaactccctgactctttgaagtttttactcaccccatttcaattatcctgatcccttctcatcccctgcttggcttctctgcatgtggtcatctgctgtggcttggtgtttaatgggttaaaaataagccactgcctgacatcccaacatttgacaccccagcaatgtgtgactcccccaacattccactatgccatcctgcagctgaaatgggaacactggctgcctctccaaacccgctcttggacagaggatctgggaggtggaagccaggccagaggacttggggaaaatgagatggaggaaggaaaaagggagaagctgagccacagcttaactcctacagagtgaaatgaaaacgggctgaaaataccaccccaggagaggacctcgccccaagcaagccagtgagcagccctgccagactactgccagactgagaaacccagaagctggtagtcatgtgggcttgccttctctgccaaacgactgggaaaccaaaatgagcccaccttgtgttcttcctagctccaccctccccgtgctgctgtgttctgctcctccccacgcttccctgctatagttcccagctgctgtaacggagccacctccaactctaacaataaaccaagttcattgcagatagtgta

SEQ ID NO: 103 - protein, 2803 aa, homo sapiens
MDGVAEFSEYVSETVDVPSPFDLLEPPTSGGFLKLSKPCCYIFPGGRGDSALFAVNGFNILVDGGSDRKSCFWKLVRHLDRIDSVLLTHIGADNLPGINGLLQRKVAELEEEQSQGSSSYSDWVKNLISPELGVVFFNVPEKLRLPDASRKAKRSIEEACLTLQHLNRLGIQAEPLYRVVSNTIEPLTLFHKMGVGRLDMYVLNPVKDSKEMQFLMQKWAGNSKAKTGIVLPNGKEAEISVPYLTSITALVVWLPANPTEKIVRVLFPGNAPQNKILEGLEKLRHLDFLRYPVATQKDLASGAVPTNLKPSKIKQRADSKESLKATTKTAVSKLAKREEVVEEGAKEARSELAKELAKTEKKAKESSEKPPEKPAKPERVKTESSEALKAEKRKLIKDKVGKKHLKEKISKLEEKKDKEKKEIKKERKELKKDEGRKEEKKDAKKEEKRKDTKPELKKISKPDLKPFTPEVRKTLYKAKVPGRVKIDRSRAIRGEKELSSEPQTPPAQKGTVPLPTISGHRELVLSSPEDLTQDFEEMKREERALLAEQRDTGLGDKPFPLDTAEEGPPSTAIQGTPPSVPGLGQEEHVMKEKELVPEVPEEQGSKDRGLDSGAETEEEKDTWEEKKQREAERLPDRTEAREESEPEVKEDVIEKAELEEMEEVHPSDEEEEDATKAEGFYQKHMQEPLKVTPRSREAFGGRELGLQGKAPEKETSLFLSSLTTPAGATEHVSYIQDETIPGYSETEQTISDEEIHDEPEERPAPPRFHTSTYDLPGPEGAGPFEASQPADSAVPATSGKVYGTPETELTYPTNIVAAPLAEEEHVSSATSITECDKLSSFATSVAEDQSVASLTAPQTEETGKSSLLLDTVTSIPSSRTEATQGLDYVPSAGTISPTSSLEEDKGFKSPPCEDFSVTGESEKRGEIIGKGLSGERAVEEEEEETANVEMSEKLCSQYGTPVFSAPGHALHPGEPALGEAEERCLSPDDSTVKMASPPPSGPPSATHTPFHQSPVEEKSEPQDFQEADSWGDTKRTPGVGKEDAAEETVKPGPEEGTLEKEEKVPPPRSPQAQEAPVNIDEGLTGCTIQLLPAQDKAIVFEIMEAGEPTGPILGAEALPGGLRTLPQEPGKPQKDEVLRYPDRSLSPEDAESLSVLSVPSPDTANQEPTPKSPCGLTEQYLHKDRWPEVSPEDTQSLSLSEESPSKETSLDVSSKQLSPESLGTLQFGELNLGKEEMGHLMQAEDTSHHTAPMSVPEPHAATASPPTDGTTRYSAQTDITDDSLDRKSPASSFSHSTPSGNGKYLPGAITSPDEHILTPDSSFSKSPESLPGPALEDIAIKWEDKVPGLKDRTSEQKKEPEPKDEVLQQKDKTLEHKEVVEPKDTAIYQKDEALHVKNEAVKQQDKALEQKGRDLEQKDTALEQKDKALEPKDKDLEEKDKALEQKDKIPEEKDKALEQKDTALEQKDKALEPKDKDLEQKDRVLEQKEKIPEEKDKALDQKVRSVEHKAPEDTVAEMKDRDLEQTDKAPEQKHQAQEQKDKVSEKKDQALEQKYWALGQKDEALEQNIQALEENHQTQEQESLVQEDKTRKPKMLEEKSPEKVKAMEEKLEALLEKTKALGLEESLVQEGRAREQEEKYWRGQDVVQEWQETSPTREEPAGEQKELAPAWEDTSPEQDNRYWRGREDVALEQDTYWRELSCERKVWFPHELDGQGARPHYTEERESTFLDEGPDDEQEVPLREHATRSPWASDFKDFQESSPQKGLEVERWLAESPVGLPPEEEDKLTRSPFEIISPPASPPEMVGQRVPSAPGQESPIPDPKLMPHMKNEPTTPSWLADIPPWVPKDRPLPPAPLSPAPGPPTPAPESHTPAPFSWGTAEYDSVVAAVQEGAAELEGGPYSPLGKDYRKAEGEREEEGRAEAPDKSSHSSKVPEASKSHATTEPEQTEPEQREPTPYPDERSFQYADIYEQMMLTGLGPACPTREPPLGAAGDWPPCLSTKEAAAGRNTSAEKELSSPISPKSLQSDTPTFSYAALAGPTVPPRPEPGPSMEPSLTPPAVPPRAPILSKGPSPPLNGNILSCSPDRRSPSPKESGRSHWDDSTSDSELEKGAREQPEKEAQSPSPPHPIPMGSPTLWPETEAHVSPPLDSHLGPARPSLDFPASAFGFSSLQPAPPQLPSPAEPRSAPCGSLAFSGDRALALAPGPPTRTRHDEYLEVTKAPSLDSSLPQLPSPSSPGAPLLSNLPRPASPALSEGSSSEATTPVISSVAERFSPSLEAAEQESGELDPGMEPAAHSLWDLTPLSPAPPASLDLALAPAPSLPGDMGDGILPCHLECSEAATEKPSPFQVPSEDCAANGPTETSPNPPGPAPAKAENEEAAACPAWERGAWPEGAERSSRPDTLLSPEQPVCPAGGSGGPPSSASPEVEAGPQGCATEPRPHRGELSPSFLNPPLPPSIDDRDLSTEEVRLVGRGGRRRVGGPGTTGGPCPVTDETPPTSASDSGSSQSDSDVPPETEECPSITAEAALDSDEDGDFLPVDKAGGVSGTHHPRPGHDPPPLPQPDPRPSPPRPDVCMADPEGLSSESGRVERLREKEKVQGRVGRRAPGKAKPASPARRLDLRGKRSPTPGKGPADRASRAPPRPRSTTSQVTPAEEKDGHSPMSKGLVNGLKAGPMALSSKGSSGAPVYVDLAYIPNHCSGKTADLDFFRRVRASYYVVSGNDPANGEPSRAVLDALLEGKAQWGENLQVTLIPTHDTEVTREWYQQTHEQQQQLNVLVLASSSTVVMQDESFPACKIEF

SEQ ID NO: 104 - DNA, 3866 bp, homo sapiens
agctactccaccccactctggctgtagtgtgacattcctgcctgcctgaggaagaaatggtgagcaggggctgcaattgcagacaagtgtcacccagaagccacaagtttctgtgagcaccaggtctacaaactacccaaggcatagcaatggcattatcactggaagaattcgtccactcccttgacctcaggaccctacccagggttctagaaatccaggcaggcatctatcttgaaggctctatttatgaaatgtttggaaatgaatgctgtttttcaacaggagaagtgattaaaattactggtctcaaagttaagaagatcatagctgaaatttgtgagcagattgaaggttgtgagtctctacagccatttgaactgcctatgaattttccaggtctttttaagattgtggctgataaaactccataccttactatggaagaaatcacaaggaccattcatattggaccaagtagactagggcatccttgcttctatcatcagaaggatataaaactagagaacctcatcataaagcagggtgagcaaatcatgctcaactcagttgaagagattgatggagaaataatggtgagctgtgcagtagcaaggaatcatcaaactcactcatttaatttgcctttgtcacaagaaggagaattctacgagtgtgaagatgaacgtatttacactctaaaggagattgttgaatggaagattcctaagaacagaacaagaactgtaaaccttacagatttttcaaataagtgggactcaacgaatccatttcctaaagacttttatggtaccctgattctcaagcctgtttatgaaattcaaggtgtgatgaaatttcgaaaagatataatccgcatcctccccagtctagatgtcgaagtcaaagacatcactgattcttacgatgctaactggtttcttcagctgttatcaacagaagatctttttgaaatgactagtaaagagttccccatagtgactgaagtcatagaagcacctgaaggaaaccacctgccccaaagcattttacagcctgggaaaaccattgtgatccacaaaaagtaccaggcatcaagaatcttagcttcagaaattagaagcaattttcctaaaagacacttcttgatccccactagctataaaggcaagttcaagcggcgaccgagggagttcccaacggcctatgacctagagatcgctaagagtgaaaaggagcctcttcacgtggtggccaccaaagcgtttcattcccctcatgacaagctgtcatccgtatctgttggggaccagtttctggtgcatcagtcagagacgactgaagtcctctgtgagggaataaaaaaagtggtgaatgttctggcctgtgaaaaaatcctcaaaaagtcctatgaggctgcgctgctccctttgtacatggaaggaggttttgtagaggtgattcatgataagaaacagtacccgatttctgagctctgtaaacagttccgtttgcccttcaatgtgaaggtgtctgtcagggatctttccattgaagaggacgtgttggctgccacaccaggactgcagttggaggaggacattacagactcttacctactcataagtgactttgccaaccccacggagtgctgggaaattcctgtgggccgcttgaatatgactgttcagttagttagtaatttctctagggatgcagaaccatttctagtcaggactctggtagaagagatcactgaagagcaatattacatgatgcggagatatgaaagctcagcctcacatcccccacctcgccctccgaaacacccctcagtagaggaaacaaagttaaccctgctaaccttagcagaagaaaggacggtagacctgcccaagtctcccaagcgtcatcacgtagacataaccaagaaacttcacccaaatcaagctggcctggattcaaaagtactgattggtagtcagaatgatttggtggatgaagagaaagaaaggagcaaccgtggggccacagcaatagcagaaacattcaaaaatgaaaaacatcaaaaataacaagatgtgacagaagccacttaggcagcaaacataaatgttgcagtgaaaaaagaagctagccttctagctgaaaaacgagtattccccaatggactccagaagaaacttgattcatcgctgcaaaggaaagaacaaccttaaaacttttaacagataaaacttacagaaacctatgatatagaattcatatagtctattctgttgtgtctaaatctgtaggcattgtgttgttgttctttaggacgtatttatttaacttgcacattttttcagattcttatttctactaccaacaactaagtaattgggaaataattctgtatttcagtttctgagtaaaaccagtctgaaataggataaaagccaccaaatattttcttttttttccagaatttgttttgccattttttagtgctatcatcattcctaacaagactaacttacagaaaaataattatatctgactgatttaaaatgttcaggtttcttatccaaatcccttggaactatggaaaggagtttgatttcacattcacagtgtatttacaaaatacgctgtgtcataaatatgtttgaattccaacagccaaagccattgagagtcataggagttttccataaccttctcttctatgacccaacaacaagctcatgactgaaatttcaccagatttctgagacgatgtcttaatattctatgtgctatgtaccagataattctttagatgaatgtttcttaggattgtaggaaaattatctagttaatcataatatttgatggaaagaaaaagacaataaaattgtaatataataaatttggctgacaagaaaccaaagtgattcttaattagtatacatcagaatgatgctcttatagttgtaccatctataaaaattactttaagggctctcacattttaataatttatcttattatgtattaagtatacaggaacaatattatttttcctttaacaaaatgaagagacaggctatctggttaatgttacataggaatttaatagtaatgcttgaacttcatccatagatcatactctgtacaaaatttgttagctaacatcctatctcataattattttatgttttgtggagaaatttgttgattttgtaccaaagtgtttctgaagacaataaattgtgagtcaactttagaacaaaaaaaattagagttttttcaatgtttatattctgattaagcttactttaccttacattttttctaagtaacaatgaatcctgatttctagtgtcctaaaaattgcttagtgatttgattgtggtaatatcatttcttatctacaatgtctaaagttttatgggacagtttttcttttatttattttgcctgtttgtgcagataagaacagaaacttttctaagacccacatttggttattgaaggccacagcgaatcttaacctaacagccttgacaaactgcaccataggtgtttttagactcatataatttgttatttttcaaacaatagtgaataattaatatttttgtttggaatttgagaacaattaaatttgtacttttagtaactaccattctttgattagaaaattaagagaatgcatatcttactttggttgtaaattatcaagggctttctaatagaaatcatatataacatttctaaatataagtcctttcacatactgtgtttccagttgtcttgatattgaaaagtgtaataaacttcatgctcacctattggagatttgggaaggttgaaaataaacttcctaatttttatttgta

SEQ ID NO: 105 - protein, 641 aa, homo sapiens
MALSLEEFVHSLDLRTLPRVLEIQAGIYLEGSIYEMFGNECCFSTGEVIKITGLKVKKIIAEICEQIEGCESLQPFELPMNFPGLFKIVADKTPYLTMEEITRTIHIGPSRLGHPCFYHQKDIKLENLIIKQGEQIMLNSVEEIDGEIMVSCAVARNHQTHSFNLPLSQEGEFYECEDERIYTLKEIVEWKIPKNRTRTVNLTDFSNKWDSTNPFPKDFYGTLILKPVYEIQGVMKFRKDIIRILPSLDVEVKDITDSYDANWFLQLLSTEDLFEMTSKEFPIVTEVIEAPEGNHLPQSILQPGKTIVIHKKYQASRILASEIRSNFPKRHFLIPTSYKGKFKRRPREFPTAYDLEIAKSEKEPLHVVATKAFHSPHDKLSSVSVGDQFLVHQSETTEVLCEGIKKVVNVLACEKILKKSYEAALLPLYMEGGFVEVIHDKKQYPISELCKQFRLPFNVKVSVRDLSIEEDVLAATPGLQLEEDITDSYLLISDFANPTECWEIPVGRLNMTVQLVSNFSRDAEPFLVRTLVEEITEEQYYMMRRYESSASHPPPRPPKHPSVEETKLTLLTLAEERTVDLPKSPKRHHVDITKKLHPNQAGLDSKVLIGSQNDLVDEEKERSNRGATAIAETFKNEKHQK

SEQ ID NO: 106 - DNA, 2668 bp, homo sapiens
ctctctggataggaagaaatatagtagaaccctttgaaaatggatattttcacatattttcgttcagatacaaaagctggcagttactgaaataaggacttgaagttccttcctcttttttttatgtcttaagagcaggaaataaagagacagctgaaggtgtagccttgaccaactgaaagggaaatcttcatcctctgaaaaaacatatgtgattctcaaaaaacgcatctggaaaattgataaagaagcgattctgtagattctcccagcgctgttgggctctcaattccttctgtgaaggacaacatatggtgatggggaaatcagaagctttgagaccctctacacctggatatgaatcccccttctaatacttaccagaaatgaaggggatactcagggcagagttctgaatctcaaaacactctactctggcaaaggaatgaagttattggagtgatgacaggaacacgggagaacaatgctctgtttgggctggatatttctttggcttgttgcaggagagcgaattaaaggatttaatatttcaggttgttccacaaaaaaactcctttggacatattctacaaggagtgaagaggaatttgtcttattttgtgatttaccagagccacagaaatcacatttctgccacagaaatcgactctcaccaaaacaagtccctgagcacctgcccttcatgggtagtaacgacctatctgatgtccaatggtaccaacaaccttcgaatggagatccattagaggacattaggaaaagctatcctcacatcattcaggacaaatgtacccttcactttttgaccccaggggtgaataattctgggtcatatatttgtagacccaagatgattaagagcccctatgatgtagcctgttgtgtcaagatgattttagaagttaagccccagacaaatgcatcctgtgagtattccgcatcacataagcaagacctacttcttgggagcactggctctatttcttgccccagtctcagctgccaaagtgatgcacaaagtccagcggtaacctggtacaagaatggaaaactcctctctgtggaaaggagcaaccgaatcgtagtggatgaagtttatgactatcaccagggcacatatgtatgtgattacactcagtcggatactgtgagttcgtggacagtcagagctgttgttcaagtgagaaccattgtgggagacactaaactcaaaccagatattctggatcctgtcgaggacacactggaagtagaacttggaaagcctttaactattagctgcaaagcacgatttggctttgaaagggtctttaaccctgtcataaaatggtacatcaaagattctgacctagagtgggaagtctcagtacctgaggcgaaaagtattaaatccactttaaaggatgaaatcattgagcgtaatatcatcttggaaaaagtcactcagcgtgatcttcgcaggaagtttgtttgctttgtccagaactccattggaaacacaacccagtccgtccaactgaaagaaaagagaggagtggtgctcctgtacatcctgcttggcaccatcgggaccctggtggccgtgctggcggcgagtgccctcctctacaggcactggattgaaatagtgctgctgtaccggacctaccagagcaaggatcagacgcttggggataaaaaggattttgatgctttcgtatcctatgcaaaatggagctcttttccaagtgaggccacttcatctctgagtgaagaacacttggccctgagcctatttcctgatgttttagaaaacaaatatggatatagcctgtgtttgcttgaaagagatgtggctccaggaggagtgtatgcagaagacattgtgagcattattaagagaagcagaagaggaatatttatcttgagccccaactatgtcaatggacccagtatctttgaactacaagcagcagtgaatcttgccttggatgatcaaacactgaaactcattttaattaagttctgttacttccaagagccagagtctctacctcatctcgtgaaaaaagctctcagggttttgcccacagttacttggagaggcttaaaatcagttcctcccaattctaggttctgggccaaaatgcgctaccacatgcctgtgaaaaactctcagggattcacgtggaaccagctcagaattacctctaggatttttcagtggaaaggactcagtagaacagaaaccactgggaggagctcccagcctaaggaatggtgaaatgagccctggagccccctccagtccagtccctgggatagagatgttgctggacagaactcacagctctgtgtgtgtgtgttcaggctgataggaaattcaaagagtctcctgccagcaccaagcaagcttgatggacaatggagtgggattgagactgtggtttagagcctttgatttcctggactggactgacggcgagtgaattctctagaccttgggtactttcagtacacaacacccctaagatttcccagtggtccgagcagaatcagaaaatacagctacttctgccttatggctagggaactgtcatgtctaccatgtattgtacatatgactttatgtatacttgcaatcaaataaatattattttattagaaa

SEQ ID NO: 107 - protein, 599 aa, homo sapiens
MLCLGWIFLWLVAGERIKGFNISGCSTKKLLWTYSTRSEEEFVLFCDLPEPQKSHFCHRNRLSPKQVPEHLPFMGSNDLSDVQWYQQPSNGDPLEDIRKSYPHIIQDKCTLHFLTPGVNNSGSYICRPKMIKSPYDVACCVKMILEVKPQTNASCEYSASHKQDLLLGSTGSISCPSLSCQSDAQSPAVTWYKNGKLLSVERSNRIVVDEVYDYHQGTYVCDYTQSDTVSSWTVRAVVQVRTIVGDTKLKPDILDPVEDTLEVELGKPLTISCKARFGFERVFNPVIKWYIKDSDLEWEVSVPEAKSIKSTLKDEIIERNIILEKVTQRDLRRKFVCFVQNSIGNTTQSVQLKEKRGVVLLYILLGTIGTLVAVLAASALLYRHWIEIVLLYRTYQSKDQTLGDKKDFDAFVSYAKWSSFPSEATSSLSEEHLALSLFPDVLENKYGYSLCLLERDVAPGGVYAEDIVSIIKRSRRGIFILSPNYVNGPSIFELQAAVNLALDDQTLKLILIKFCYFQEPESLPHLVKKALRVLPTVTWRGLKSVPPNSRFWAKMRYHMPVKNSQGFTWNQLRITSRIFQWKGLSRTETTGRSSQPKEW

SEQ ID NO: 108 - DNA, 3447 bp, homo sapiens
actcgaagtgcggcgggagaggcgggagcccaggagagggtgcgggagctggcggggcggctcggagctgccaggacgccctggtcccagccgcgcacaggggagcgtggacggcagaggggctcggcgggagccgagatccgcccgtcccggctgcccctcggcctccctctgctcccacctaccccctgacacccatagaaaagcgtgcaaaggcgcggagcgggacggaaaccacaaataaatagcggcggcggcagcgcgtcatctggtggagcaggaagtgcaggcagagtccggaggctggtgctttctgcgcgtccccaggactttgccatgggctgggggccgcggaggctgcgagcggccgggcgagggcagcggcggcggcgtccgcaccggggctgagcgagcagcgacgcgaggggcgcgcggagatggcagcgtccagcaactccagcctgtccggctcgtcggtgtcctccgatgctgaagaataccagcctcctatatggaaatcatacttatatcagttacagcaagaggcacctcgtcccaagagaatcatttgtcctcgggaggtggaaaacagaccaaaatattatggaagagagtttcatgggatcatctctcgggagcaggcggatgagcttcttggaggcgtggagggtgcctacatccttagagaaagccagcggcaaccaggatgctacacgctggctctcaggtttggaaaccagaccttaaactacaggctcttccacgacgggaaacactttgtgggtgagaagaggtttgagtcgattcatgatctggtgacagatggcttgataacactgtacatagaaacaaaagctgccgagtacatttcaaaaatgacaactaaccccatctatgaacacattggatatgccaccctactcagagaaaaagtatccagaaggctgagcaggtctaaaaatgaaccaagaaaaacaaacgtcacacatgaagaacacacagcggtggaaaagatctcctccctggttcgaagggctgccctcacacacaacgacaaccacttcaattatgagaagacacacaactttaaggtccacacgttccgaggcccacactggtgtgaatattgtgccaatttcatgtgggggctcatcgcccaaggggtccggtgctcagactgtggattgaacgtacacaaacagtgttccaagcacgttcccaatgactgccaacctgatctcaagaggatcaagaaagtgtactgttgtgacctcacaacacttgtgaaggctcacaacactcagagacccatggtggtagacatatgcattcgggaaattgaagcaagaggattaaaatcggaaggcctttacagagtctctgggttcactgaacacattgaagatgtcaaaatggcatttgacagagatggtgaaaaggccgatatatctgccaatgtctatccagacataaacatcatcactggagcccttaaactgtatttcagagacttacccatccctgtcatcacatatgatacctattccaaatttatagatgcagcaaaaatctccaatgcagatgagaggctggaagccgtccatgaagtgctgatgctgctgcctcctgcccactatgaaaccctccggtacctaatgatccacctcaaaaaggttactatgaatgaaaaagacaatttcatgaatgcagaaaatctggggatcgtgtttgggcccactctgatgaggccccctgaggacagcaccctgaccaccctgcatgatatgcggtaccaaaagctgattgtgcagattttaatagaaaacgaagacgttttattctaatccatcagggaaatgagctgaatggccccagcaccatccaagttgacacagctaaaggaataaaaacatttcttaccacttgatttgttttccaagcaagtgctagaatttgctggactgcagaggatcgctgagtggggtactgtgtctcatagacatgcgccacctccacgtgagaacaagggtgaaggtgagggaagcccctcaccttgggtcttttgctgtgcctcctatgtatgtctggtttgctggaagagtgattaatacatctttaatttattaaaaaacaatgtagacctttaaacttcagtcttattggtaataaaagggaacttaattcatacaggtacttgatacagttatacattttccacttacaaaaagaagacaattctgttaaatgaaacgtgtatcgtaaaatgtatttttattttacccacgagaatgttgttatttttagcaaatagaactcaatgcagtgcattggttattaccctgtgtaccttgtccctcattttgctgtgacaccctgaaaaagctgaccacaaatgcagtattatcttgacatacctctgtcctcctcagtgctttttaatgaaatttcacctgccccttgtgttcctgctttggatagtttttgctcttaagcattggcattcttctattgtatggtatgtatttatagcaattgtaggatggtctgaaatgtccacacactttctatgcatacaaattttgtgaattcccaaagtatgctttggaattggtcatagtcttttcgtatcatgagtgtgtatcccagaagatacagaatgcggtcattttacctgaaattatttgagaacactggatgtatctggtctgtgtaaaaagttagcacttaccctcttttcttcctggccaagccctctgaattcatctgttaatatcaaattgtatttttgccacatttctgtattggtgaaaagcgaatctgcagaataactgtcaacgtttttcattcttgttttacaaacctattttttaaagtgagaataaggttggtttttaccaaatatttgttcctccttgacaaaagtagctctgtgtggataatatgattttattactacagttccagtcacttggttatatttatcttagcatgagcctttcacaccaagatttctatattttgtaacataggtgaaatatttaaaacatcaaaaactgtaaatctagatttttaaaaaatccaactgcaatgtcttttcctttgattgagatgatttgtgtaaactcaccagtcttgctttggagtgagcagaagagaatgactattttacgtggagcatcattgtgtgactgttgacctggacagtcccaagggctatgcagatggactccattggcacagggaggtttgacctcttccctgctattatccctcctcccaactgtacagatttgtttgttgtagtttatgtacttcttgatactgtcaaaaaattatctggaaatggttttattttgtgaagtgaacaatactttgtaatttatgatagtgtaaatggaaggcaaagcatcacatgtattaaattcttctgtctattaaaaaaaaaaa

SEQ ID NO: 109 - protein, 468 aa, homo sapiens
MAASSNSSLSGSSVSSDAEEYQPPIWKSYLYQLQQEAPRPKRIICPREVENRPKYYGREFHGIISREQADELLGGVEGAYILRESQRQPGCYTLALRFGNQTLNYRLFHDGKHFVGEKRFESIHDLVTDGLITLYIETKAAEYISKMTTNPIYEHIGYATLLREKVSRRLSRSKNEPRKTNVTHEEHTAVEKISSLVRRAALTHNDNHFNYEKTHNFKVHTFRGPHWCEYCANFMWGLIAQGVRCSDCGLNVHKQCSKHVPNDCQPDLKRIKKVYCCDLTTLVKAHNTQRPMVVDICIREIEARGLKSEGLYRVSGFTEHIEDVKMAFDRDGEKADISANVYPDINIITGALKLYFRDLPIPVITYDTYSKFIDAAKISNADERLEAVHEVLMLLPPAHYETLRYLMIHLKKVTMNEKDNFMNAENLGIVFGPTLMRPPEDSTLTTLHDMRYQKLIVQILIENEDVLF

SEQ ID NO: 110 - DNA, 6540 bp, homo sapiens
tgctgatcgctcgtgccggtgcggccgttaaccgcccttgccggagccctaggctcaaaagcagccccttacccttcctgggcttcccccaacccctttcccggtctgccctggggcatgagcagcgatggccggctgcatccctgaggagaaaacttaccggcgcttcctggagctattcctgggcgagtttcgcggaccgtgcggcggcggcgagccggagccggaacccgaacccgaacccgaacccgaacccgagtccgagcccgagcccgaacctgaactggtagaagctgaggcggccgaggcttcggtagaggaacccggggaggaggcggccacggtagccgcgacggaggagggggaccaggagcaagacccggagcccgaggaggaggcggcggttgagggtgaggaggaggaggagggcgcggcgacggcggcggcagccccggggcactcggccgtgccgccgccgccgccccagctgccgcctttgcccccgctcccgcgaccgctgtcagagcgcatcacccgcgaggaggtggagggcgaaagcctggacctgtgcctgcagcagctctacaaatataattgcccttcctttttggctgctgctttagccagagccacatcagatgaagtccttcagagtgatctttctgcacattatatcccaaaggaaacggatggcacagaagggactgtggagattgagacagtgaaattggcccgttctgtcttcagcaaactacacgagatttgctgcagctgggtgaaagacttccccctccgcaggagaccccagctttattatgagacatcaatccatgccatcaaaaacatgcgcaggaaaatggaggacaaacatgtctgcattcctgactttaatatgctcttcaacctagaggaccaggaagaacaagcttactttgcagtgtttgatggccatgggggagtagatgctgctatttatgcctccattcacctccacgttaacttagtccgccaggagatgttcccccatgatcctgctgaggccctgtgcagggccttccgggtcactgatgagcggtttgtgcagaaagcagccagggagagcttaagatgtgggaccacaggagtggtgactttcatcagaggcaacatgctacatgtggcctgggtgggtgattcccaggttatgcttgtgagaaagggccaagctgttgaactaatgaagccacacaaaccagacagagaggatgaaaagcagagaattgaggcccttggaggttgcgtagtctggtttggtgcctggagggtgaatggaagtctgtcggtttccagagctattggagatgctgaacataagccatatatctgtggggatgcagattctgcctccactgttctggatgggaccgaagactacctcattctggcctgtgatggcttctatgacaccgtgaaccctgatgaggcagtgaaagttgtgtccgaccacctgaaagagaataatggagacagcagcatggttgcccacaaattagtggcatcagctcgtgatgctgggtcaagtgataacatcacggttattgtggtattcctgagggacatgaacaaagctgtaaatgttagtgaggaatcagattggacagagaactcttttcaaggagggcaagaagatggtggggatgataaggagaatcatggagagtgcaaacgcccttggcctcagcaccagtgctcagcaccagccgacctaggctatgatgggcgtgtggattcattcactgatagaactagcctgagcccagggtcccaaatcaacgtgctggaagacccaggctacctagatctcacacaaatagaagcaagcaaacctcacagtgcccagtttttgctaccagttgagatgtttggtcctggtgcaccaaagaaagcaaatcttattaatgagttaatgatggagaaaaaatcagttcagtcatcattgcctgaatggagtggtgctggagagtttcccactgctttcaatttgggttcaacaggggagcagatatacagaatgcagagcttgtctcctgtctgttcagggttggaaaatgaacagttcaaatccccgggaaacagagtttctagattgtctcatttacgccaccactactcaaagaagtggcacagattcaggtttaatccaaagttttattcatttctctctgctcaagagccttcccacaaaataggcactagcctgtcctcacttactggaagtgggaagagaaataggataagaagttctctgccatggaggcaaaatagttggaaagggtacagtgaaaacatgaggaagctcagaaagactcatgatattccatgcccagatcttccttggagctataaaatagaataatttttctttcaagtaggttagctagctctcccccaataaaaataccactatcagagtagaaacaaggtagacatttctaaaacatatgtgcttcattatgaatccatggatggctcaattcttaaatgtaaatagatctctaggaaactcaaagtacagtgttttcaatctaaaaagaagtattggcagtttcacttgcaaaattacacagctggtccctgtgatgtgtctcgacaccaatacacaacccccttcccaccatccttcatgtcactagatacacaacccccttcccaccatcccttcagtcactagtggaagctttcaagttagttatttcagtcaggatatacagtgttgaaatctcaatgcagttgaaatctggtctgatgtgcctaatttatctgtggaaaatttaatgctgaattacatttggttgggaaatgtccctcaaaatcctgggcactatgaaggaaccccctgccccctcacctttttgggtaggtaaaagactaaaagccatatggattttaactgataacaatgaaagtggtaaatcagtgtaaaagtgtcatattctcagacttgtgaggcggtttatagtcagaaagatttacggatttttttcctgtaacataaaagattgtgaactttttttaattaaaaaatatttcctagggctgtagttatttgggagtttcataacctgttatggtgcttttggtggaaatttttattatttagcattttaggagaccgctgtcaactggttttaatctatgatgctaatgtgttttccactgtaccctcatctcaggaataaaactgctttaacggagatgatgtcaggtacaaatacactatagagtcaaaataccatttacaaagaaaatcaaaagcatttctatattttgtctttttttagttcagacagcaaaggcatgtactactataaaatacaaagtgattttagagaatgaaaaatgctacttttatcttctctaaaattatttcccccaaggtagtgaagtaattggaatgaaggaggctgaaagtattgtctaaagtgagcccagaggccactgagaatgcagattactgacagccaggtctgtttagttgtaattggaagacacatgagtgtcctgcttacatgtagcttcagactgcagagacaggacgtgtgcttttcatttcaatatttagttatatttgatattttgaaactgtctgctttttgctatttctgcagtttcaagttagttagaagcatgttgtcaactaaagacaacaaactatcagattcattcattcagtgaagcagcctctgattctctaagagtcacgaatgtcttagtgttaccctcccctagtcaacagcagaccagcctggccaatgcctatgggtggcccctctggagtgctcactaacaagggtgagtgctctcgctaagaagtgtcccccgcctaatcatgtgtttataggatagtacacgttccccaggcccataacagaggactaaaatctctgaattttaaagacacagatgactggcatattttggataccagtatagctatatcaaatagacaaaaacagcttcactttagcaatgatcagattgttaatctacagattttattttttaaaatttggatgtaagtagagactttcagtatttgttttctcttgattttgaagtcatttcttcttctcacgtctgtgacaaatggttgaaaaggagtcaacatggccccaactatagtgccggaaccttttcatcattctgaggctttgccccacacatggtcctcactcatatctgtcaccttctgaagcctagatcttgttaacccatcaggtgcagtgtcagtttcaaatcaaattatctaagaaaacaagaaaacaaaggcagcagactattggtacacattatagtccaaagtgcttagcgaagtaaaaaaaaaagctttttaaaatttctattgttgtctattggtaatgtttttgatcagaataaagagggtaaagggaaaaagttactacacatgctaggctttctcagtggggaaaaaaatggctggatagaactgggacaaacacagacccatctttaggggtctggattttgtaggtccgactacacagcagtgttaactcatttctcatgccattagctctctacaaaataaagcaaagtagttctagtgtggtcgttataaaccaatattgtgaaaaatagcaactattcatttgttcacaacatgcgtatttatagagtagttaggtaccatttgtaaggtaaatcctttaaaattctataatacatactaaaatagtggttattggtctgatatatgctgctcttggttctataaactagataaaagcagtgctttgtgaaatgcagtgttctctcttaacgccactggtgataggaagtagttcccttcagttcaaatcctgtgcccttatttgctgcttgctgacgtaagcaataagtaaccctctaactaatggtatctacatatttctgtaacttgtatttaatgatggtgtacctggtgattgtaaaaatattagacagatataaaagtatctatataatatctataaactgttaatgctgaggtatagtctgtgaattatgtgttttgtatttttattcattgtgtaatttagtggtggtgaaagttctacactcaatccttaaagagtggcagtatccctttttcaatttaacatggtctgcatcaatctgtttgcctgctaaacaagttagaataggaaatagtaaaataaatccaaacaagagtgtaatattggttagggaaacaaacttcaggtcaccaactgaagtcattacaaactccttgtacattcactgtgagtttcaaagggagtcagtccctaatttacaggtttcctttgttcactttctagatgtgtacttttgagggacatgaggttaggcaacattacagcaacacacactggggctattaatcccatttaggtctgtactaaagaggatgggtagaaacacatatgtatataccttttctttacctagaagtgccatccattgtccttgaattattatgattaaagttactgttgcatttaggaggctccttgaaagtaacaccttttccaaggacaatggcaacaatgtcaatgtcaacactgagtctaattttgaccacatttatagtggtatagtgtcaatactgcattttcatgacaaccacactccactgttgaaacactgtgccagtgagaagtgcaacatccagtgggcagatgaaaatgatgcatggccaagttcagtgtttacagataaaactgctgtggttcaagtgcttccttccccatcaaatccttgataaggctttgtgggaaaatgatctaaattattgttttaatttttaaacctaatttattcactcagtgaacattcttacctaagcaaggctataaaagggaatactacagttttgtccacactttaatttgagaccatttttctttgaatcgtaagttagcaaaagaaatttttttcacctttgaaaatcacgtgatgttaaaggacaaatgcccactcttctattctgatctgcaaatagcttaaatgtctcttgcaaaacaaagtaagataccaccagtattacaacacaatgattttccagacaaatggtatggtgttgaaaaataactgttacttcttaaagcagcattttatcttctattttgaagactatttattgtaataattagaaaacatgaaatagggaactccagactgacacagcagttgtttttgaaaaggaaataaactttgatgaattagataatccagatacatcattgtaaactcttactctaggtgctctttggtgagagacaggctttgttctcttgttcataacatttctctgcaaagaattctctatggagtgaagcgaatgaagtgaataatttcttaccaaataaatttatcaatttacaaatctgctctacatctcacttttgagttcagttgtagtcatgagtgatccttcatattttattaaaagtgttcattcaggtaaggtgtatgttgaaattttgccaattatcttaataaaacctggcaatttaaaaa

SEQ ID NO: 111 - protein, 755 aa, homo sapiens
MAGCIPEEKTYRRFLELFLGEFRGPCGGGEPEPEPEPEPEPEPESEPEPEPELVEAEAAEASVEEPGEEAATVAATEEGDQEQDPEPEEEAAVEGEEEEEGAATAAAAPGHSAVPPPPPQLPPLPPLPRPLSERITREEVEGESLDLCLQQLYKYNCPSFLAAALARATSDEVLQSDLSAHYIPKETDGTEGTVEIETVKLARSVFSKLHEICCSWVKDFPLRRRPQLYYETSIHAIKNMRRKMEDKHVCIPDFNMLFNLEDQEEQAYFAVFDGHGGVDAAIYASIHLHVNLVRQEMFPHDPAEALCRAFRVTDERFVQKAARESLRCGTTGVVTFIRGNMLHVAWVGDSQVMLVRKGQAVELMKPHKPDREDEKQRIEALGGCVVWFGAWRVNGSLSVSRAIGDAEHKPYICGDADSASTVLDGTEDYLILACDGFYDTVNPDEAVKVVSDHLKENNGDSSMVAHKLVASARDAGSSDNITVIVVFLRDMNKAVNVSEESDWTENSFQGGQEDGGDDKENHGECKRPWPQHQCSAPADLGYDGRVDSFTDRTSLSPGSQINVLEDPGYLDLTQIEASKPHSAQFLLPVEMFGPGAPKKANLINELMMEKKSVQSSLPEWSGAGEFPTAFNLGSTGEQIYRMQSLSPVCSGLENEQFKSPGNRVSRLSHLRHHYSKKWHRFRFNPKFYSFLSAQEPSHKIGTSLSSLTGSGKRNRIRSSLPWRQNSWKGYSENMRKLRKTHDIPCPDLPWSYKIE

SEQ ID NO: 112 - DNA, 3233 bp, homo sapiens
ggctggagaggcgtgataatagaaccagtgcttcaacagcaacttctcttttgcaatccttgctggtctgacaggctcctgcagaattacatcacttcctaaaaaacaggcacacacctctccttcaagtcagcaccgacccaaacaagcaggaaacaggaaatgttcacgtttcagagaggctgcagcccggcgcagcatcctgagcgcgcctctgccgaggcgagcggacatgcaggctccccgcgcagccctagtcttcgccctggtgatcgcgctcgttcccgtcggccggggtaattatgaggaattagaaaactcaggagatacaactgtggaatctgaaagaccaaataaagtgactattccaagcacatttgctgcagtgaccatcaaagaaacattaaatgcaaatataaattctaccaactttgctccggatgaaaatcagttagagtttatactgatggtgttaatcccattgattttattggtcctcttacttttatccgtggtattccttgcaacatactataaaagaaaaagaactaaacaagaaccttctagccaaggatctcagagtgctttacagacatatgaactgggaagtgaaaacgtgaaagtccctatttttgaggaagatacaccctctgttatggaaattgaaatggaagagcttgataaatggatgaacagcatgaatagaaatgccgactttgaatgtttacctaccttgaaggaagagaaggaatcaaatcacaacccaagtgacagtgaatcctaaacctgaatggcgctcatgttttccaagagaagcagcccctgagggagtctgctgaggctgccaacagaggatgaagaggatacaaatttaattaatttcaaatcaacatagacacaagaaccttttgctgtttcttccaacgcccactcttcctaatgatggcatcacttgcacttggaagaatgtgcaattgagaagtactaggaaaaggcctggctgccatccatcgctgcctctgagggtggagaaggaggcgggtgatgtgctcacttctgatcaacatgtgttgcctcctctcagccaacttctagctcactgcactcactctggtcatgataaatgttcgtcacctttctgcttcattccttagggcctaaatcaggaagctgttttatcgatggtttccttttgggtcagtaaccagctttggataatttcctctgattattcaagtcgtgggacaggtaaactacattcagcaggaacttttctcgaggagtgttatgtcatggaaaagacaccaaacacagcaagtattttaatgaatacaccatcccagggggtcagtaagctctgcctgccaagaagacacagtgagaggggtccacagtcctgatgaggtggcgtttggtaacttgtagaccctagcatggccaggtctggtcacccttaagaacttctcagagaaactaggaatcttcagtgaaagaactaatgttctcctcagctgaaattcccttgcttgtcagcatttctgcaaagctcacacttgtttcaccatacctcccttggatgtgacatgtaggtaggaagtatgtgcaggtgggagtcatctgtcagccttctatgtttcagagatcctgaaggtggtttgaaacaaacagaagaggagcaggaaatatccgtgcctgtggcagatctcactcatcatgcttagcattctctcccgccaagctgggataagcctcatgtcctaacacagcacaacaggaggtctctgtcagtccatcagagatgacattctatgtgatatttttgacatccttgtgctaaaagcaatggcacaaaatggaaaagggcctattgaccacacctactccagtaaaattgttcttcatttattccttaattttctaaatctgacccctttaaagcaatctagcaaattgagaatcctcagctctccttggatacctgatattttatttcaagaaagagacaaagaaggaaaattttatttattttactacccacatataaaccgaagggagatgggactacccaaacatttgctgctcaattttgtgtcttgtgcttgaaagtctgccctaatgcataacaaaaactacttgtctcctaccttttgggatccctttaacaagtatttgccttctgaactacgtggataatttcaaaggcagagttccagaccagagaggtctttccatacaatgaaagctataactagctggttgtgtttaaccactgctatcacgctatcctgggactgcatagaactttgacaaaagacagacttcatggtacacaacttcaacagattttctgtcatattctcaccagcacatctgaatgaggctttgtgttttccttgctctcttgcatgttccttttcaactcatggcccacagtgactctcagagatttatgccaaaattgcatacaattgttttctgaatcataacttgtctatttttctgcctatgtgtgctactttcagtttgtttctcatcaacattttgactctcagaagagcctccatttgcccctttctctctttaggtatctaagatctttgaacacctggacctttacatttgatccaaccctatcaaataatgaacttctcagagaggcatctggggtcctggaacttcatgttgatgaagtcatattatataatatgataaaaatattctcatgcagtattttaaataatttcaaattctagaagaagcaaatttcagcgacatgtcattgagtttttatttggtaaagctataattgtgcagtgtacaaagcactttttaaaaagatagtttattctgtcagggtatatgaagttagtatacagccagaacagccaagcctcaattcttgtaccttgtgtctttttattactgtttaatcaatagatatcatatgtttatgacagtttcaagaattgtttttaaacccaaacttaattttatgtttcagactattgttagaaaaacaaaacaaaaaacaaaaaaaccctcactaatttgccctaattggatagggcaatcagaacaaaatctgactttcgaatatttaaaagatatgtaagtttgattgcattttcgtacattttaagcaaactaggttaacaacaacatagcctagtcaaacttctcaggaaacttgttttaataaatatgtaaaaatacccaaaaaaaaaaaaaaaaaa

SEQ ID NO: 113 - protein, 183 aa, homo sapiens
MQAPRAALVFALVIALVPVGRGNYEELENSGDTTVESERPNKVTIPSTFAAVTIKETLNANINSTNFAPDENQLEFILMVLIPLILLVLLLLSVVFLATYYKRKRTKQEPSSQGSQSALQTYELGSENVKVPIFEEDTPSVMEIEMEELDKWMNSMNRNADFECLPTLKEEKESNHNPSDSES

SEQ ID NO: 114 - DNA, 1951 bp, homo sapiens
gagcccggagcaggccgggctcaagaaagaggaaagttgaggacgccccacctcggagaggcggcgcccctgagtaggccaggagcctctcttgcaacttctgccaccgcgggccaccgcggccgcctgatcccgcagaggaaggtcgcggccgtggagcgatgacccgcggcggtccgggcgggcgcccggggctgccacagccgccgccgcttctgctgctgctgctgctgctgccgctgttgttagtcaccgcggagccgccgaaacctgcaggagtctactatgcaactgcatactggatgcctgctgaaaagacagtacaagtcaaaaatgtaatggacaagaatggggacgcctatggcttttacaataactctgtgaaaaccacaggctggggcatcctggagatcagagctggctatggctctcaaaccctgagcaatgagatcatcatgtttgtggctggctttttggagggttacctcactgccccacacatgaatgaccactacacaaacctctacccacagctgatcacgaaaccttccatcatggataaagtgcaggattttatggagaagcaagataagtggacccggaaaaatatcaaagaatacaagactgattcattttggagacatacaggctatgtgatggcacaaatagatggcctctatgtaggagcaaagaagagggctatattagaagggacaaagccaatgaccctgttccagattcagttcctgaatagtgttggagatctattggatctgattccctcactctctcccacaaaaaacggcagcctaaaggtttttaagagatgggacatgggacattgctccgctcttatcaaggttcttcctggatttgagaacatcctttttgctcactcaagctggtacacgtatgcagccatgctcaggatatataaacactgggacttcaacgtcatagataaagataccagcagtagtcgcctctctttcagcagttacccagggtttttggagtctctggatgatttttacattcttagcagtggattgatattgctgcagaccacaaacagtgtgtttaataaaaccctgctaaagcaggtaatacccgagactctcctgtcctggcaaagagtccgtgtggccaatatgatggcagatagtggcaagaggtgggcagacatcttttcaaaatacaactctggcacctataacaatcaatacatggttctggacctgaagaaagtaaagctgaaccacagtcttgacaaaggcactctgtacattgtggagcaaattcctacatatgtagaatattctgaacaaactgatgttctacggaaaggatattggccctcctacaatgttcctttccatgaaaaaatctacaactggagtggctatccactgttagttcagaagctgggcttggactactcttatgatttagctccacgagccaaaattttccggcgtgaccaagggaaagtgactgatacggcatccatgaaatatatcatgcgatacaacaattataagaaggatccttacagtagaggtgacccctgtaataccatctgctgccgtgaggacctgaactcacctaacccaagtcctggaggttgttatgacacaaaggtggcagatatctacctagcatctcagtacacatcctatgccataagtggtcccacagtacaaggtggcctccctgtttttcgctgggaccgtttcaacaaaactctacatcagggcatgccagaggtctacaactttgattttattaccatgaaaccaattttgaaacttgatataaaatgaaggagggagatgacggactagaagactgtaaataagataccaaaggcactattttagctatgtttttcccatcagaattatgcaataaaatatattaatttgtcactttaaaaaaaaaaaaaaaaaaa

SEQ ID NO: 115 - protein, 553 aa, homo sapiens
MTRGGPGGRPGLPQPPPLLLLLLLLPLLLVTAEPPKPAGVYYATAYWMPAEKTVQVKNVMDKNGDAYGFYNNSVKTTGWGILEIRAGYGSQTLSNEIIMFVAGFLEGYLTAPHMNDHYTNLYPQLITKPSIMDKVQDFMEKQDKWTRKNIKEYKTDSFWRHTGYVMAQIDGLYVGAKKRAILEGTKPMTLFQIQFLNSVGDLLDLIPSLSPTKNGSLKVFKRWDMGHCSALIKVLPGFENILFAHSSWYTYAAMLRIYKHWDFNVIDKDTSSSRLSFSSYPGFLESLDDFYILSSGLILLQTTNSVFNKTLLKQVIPETLLSWQRVRVANMMADSGKRWADIFSKYNSGTYNNQYMVLDLKKVKLNHSLDKGTLYIVEQIPTYVEYSEQTDVLRKGYWPSYNVPFHEKIYNWSGYPLLVQKLGLDYSYDLAPRAKIFRRDQGKVTDTASMKYIMRYNNYKKDPYSRGDPCNTICCREDLNSPNPSPGGCYDTKVADIYLASQYTSYAISGPTVQGGLPVFRWDRFNKTLHQGMPEVYNFDFITMKPILKLDIK

SEQ ID NO: 116 - DNA, 1463 bp, homo sapiens
ccggtcccagagccgcagctgctgcgcccgcgcgctcccggggacattctaaccgccgccaggtcccgccgcctctcgccccgctattaataccggcggcccgggaggggggcgcagcacgcgccgcgcagccatggggaggctgctggccttagtggtcggcgcggcactggtgtcctcagcctgcgggggctgcgtggaggtggactcggagaccgaggccgtgtatgggatgaccttcaaaattctttgcatctcctgcaagcgccgcagcgagaccaacgctgagaccttcaccgagtggaccttccgccagaagggcactgaggagtttgtcaagatcctgcgctatgagaatgaggtgttgcagctggaggaggatgagcgcttcgagggccgcgtggtgtggaatggcagccggggcaccaaagacctgcaggatctgtctatcttcatcaccaatgtcacctacaaccactcgggcgactacgagtgccacgtctaccgcctgctcttcttcgaaaactacgagcacaacaccagcgtcgtcaagaagatccacattgaggtagtggacaaagccaacagagacatggcatccatcgtgtctgagatcatgatgtatgtgctcattgtggtgttgaccatatggctcgtggcagagatgatttactgctacaagaagatcgctgccgccacggagactgctgcacaggagaatgcctcggaatacctggccatcacctctgaaagcaaagagaactgcacgggcgtccaggtggccgaatagccctggccctgggccccgcctcaaggaagagccagccgtaatggggactctccaggcaccgcctgcccccagcgtgggggtggccactcctgggccccagaaagcctcagagtcctgccgacggagccactggggtgggagggggcagggggcttggctcgcacccccactttcgcctcctccagctcctgccccgccggccgcgcaccgccatgcatgatgggtaaagcaatactgccgctgcccccaccctgcttctgctgcctgtttggggaggggggcggtgaggtgggggcagcggccccgcacccctcctccttgctgatttgcacacattggccgcttcagacacgcacttctggggccagcccctccccgcctcctccctgcctggcggcaggggtcgcgatgatgggctggagcagtttggggcagggggttctgggacccactccgactccccctccccggcatcatttcccctcccgcttcctccggctggacctggggtcccccctccctgtaatgcactcctgccccggcccaacctcgccctctctcaccagccttgaactgtggccacctagaaaggggcccattcagcctcgtctctttacagaagtagttttgttcatgaaataaagactcttggacttgaaaaaaaaaaaaaaaa

SEQ ID NO: 117 - protein, 218 aa, homo sapiens
MGRLLALVVGAALVSSACGGCVEVDSETEAVYGMTFKILCISCKRRSETNAETFTEWTFRQKGTEEFVKILRYENEVLQLEEDERFEGRVVWNGSRGTKDLQDLSIFITNVTYNHSGDYECHVYRLLFFENYEHNTSVVKKIHIEVVDKANRDMASIVSEIMMYVLIVVLTIWLVAEMIYCYKKIAAATETAAQENASEYLAITSESKENCTGVQVAE

SEQ ID NO: 118 - DNA, 4396 bp, homo sapiens
ggcgcggcggggcgcggggcgtggggacgctagcgggcgccggacgggcgcggcgccccgtcacgggcagcgccccgaaccggggccggacacctcggccgctcgggccgcggcggcggggaccatgccgaagaaagtctcctgagcccggcaacttcggcccctccccgcccccacccggctgccctccgcgcggccctccccatgtgcagccggccagccgggctctcctcctcgcggcggatgggtgaccttttcctggcacgggcaggctgtgggaggcagcggagcaggcgatgaagaagaagcagcagcatcccggcggcggcgcggatccctggccccatggggcccctatggggggcgcccctccgggcctgggcagctggaagcgtcgggtgcccctgctgcctttcctgcgcttctccctccgggactacggcttctgcatggccaccctgctggtcttctgcctgggctccctcctctatcagctcagcgggggaccccctcgcttcctgctcgacctgcggcagtacttgggaaattccacttacttggatgaccatggaccacctcctagtaaggtactacctttcccaagccaggtggtgtacaacagggtaggcaagtgtgggagccgtactgtggtcttgcttctgagaatcttgtcggagaagcacggatttaatttggtcacatcagacattcacaacaaaaccaggcttactaaaaatgaacaaatggaactgattaaaaatataagtactgccgaacaaccctatttattcactcgacatgttcatttcctcaacttctcaaggtttggaggagaccagcctgtctacatcaacatcattagagaccccgtcaaccggttcttatccaactattttttccgtcgctttggagactggagaggggaacaaaatcacatgatccgcacccccagcatgaggcaggaggagcgctacctggatatcaatgagtgtattcttgaaaactatcccgagtgctccaaccccaggttattttacatcattccgtacttttgtggacagcatcccagatgcagggagcctggtgaatgggcccttgagagagcaaagctgaacgtgaatgaaaacttcctgctcgtggggattcttgaagagttggaagatgtgctgctgttactggaaagatttttacctcattacttcaagggcgtgctcagtatctacaaagacccagagcacaggaagcttggaaacatgactgtgacggtgaagaagactgtcccctctcctgaggctgtgcagatcctctaccagcggatgagatacgagtacgagttttaccactacgtcaaagagcagttccacctgctgaagcgcaagtttggacttaagtctcacgtcagcaagccccccctgaggccacacttctttatcccaactccactggaaaccgaggagccaatcgacgatgaagaacaggatgatgaaaagtggctggaagatatttataagaggtgatgtgactgtgttgcctctatggctttatctcccttttccagaaagttctttgtttggggaagtaaaatccttaagggactaaattaatgcttgggtgcattaaaaagaacaaaacattcccacatgttggggtcattgggagatgcccggttttgcgggttttatttgtttaattttattctgtgttttctcttggctctttgggtctttcccgggtacactagatggctccatcccaaggcatcttgtcataaaacagctttcccccaccccatatcatgggaaaagggggagaaatatagcccctagcctaataacttatcatttgtaaaatgacttataaaaatattacctcaatggtaggagacatccagacttgtatatttcagtggaaatacaaaaccacttcagagaccagggtatctcctctggaaggatctaagagaaggtaagacagattaggacatcgaaaaggaggatggagccaggtgccatggcttgagcctataatccgaggctgaggtgggaggatcacttgagcccaggagtttgaggttgcagtgagctgtgatcacaccactgcactccagcctgggtgacagagtgagactctgtctcaattaattttttttttttaaaggaggaggatctccatgggtaagtggtttctacccgcatgggtagagttctgcctctggtccttctcagggggcactttcaccaagagcagtgtaattatctctgaaagagcaagtcagcttgtgccgcatccccaaccaatccacagcctggagtacctttcaaggtcaaagtgcatggccagctccattgagacattccatttcaaagcaccgtgctgacagatatcaaagtactctagcagggaaaataatttgtttgctgtgtaaggaagaatgtagacaagacagataaatctgaaggtcatgtggcatcagggaaagggcatggctgtgtcttttgcacccaatatgaaacatcttctcccaacactgctttaatggaagttctaggaaccaatttagctcaggcatttgactcctacagcagaagttctgagcctgaccacagatggtgtgtaatctatcaaacacacccctggccaagttgggtcctataggacctggtactatgtactattgtaacttctagttccctaagaggtacctgttttcagtaaaaaggggtcctgagttctgtgcaggtggaagagctacccgagaactacctgagttctgtgcaggtagagtcccatttcttatgggacctgtgtgctcctgagaactcttacttgagacatcaaaaagaagcagcaagagcttctgggacagagactgcttggccagctttgtaagtaagtggctgcctccaatgtgatgtgagtacatgttgggcagtctcactgtcctaaggtatgtcttctttccacctcccactgcccctcccctgccacctatcaatgatgccttggttcagtcattagaaatctgttgctttgagttctgaaatattttcaccttaaaaaaaatgctgaaaatacacattctcctgggaagacgataaacagctagctaagaagccgaggttcagtggtggcagcaggaaggacactgccacaaattttgtctatttcatatttgtcccctagagccagccctagcaaatgtgtgagttgggagtagttaatagtaaataagactctgactttacacaagctacacattttatacttttcataaaccacaaagtctctctagaattttttctgccttcactaaaattggactgtagccaagatataaagcaagtcatttggaacctgccgagtgagcactgaagctactttatcatgagatgtgtgttaagaaggctgcagcccacaggagtccagggaaggcggggaccacagaggcacagagtccagcacttggccgctcatgggccttctttctgcctcagaggacgggggcagagaagtgatgaagggaaatgttcttagaggaggaaatatcctttgtcctgttcagagagaccagggccctaccattaggcatactttcagaagcaacctggagaacagctatcaatcatattcaaaaccagtacaagaactgctgcctggtaccctgtgagtcatttctatgaaattccatataaagaatgatgataagtttacacactgtgcaatctcacaatctgaaaataaagttgagttggctgtgttttctctgctcttgtcagaacattgggacaattggtcgttcaaaaacattcatcctcttactgcaagtttatctgggtacttttacctgtgtgttcaaaggcatttcttttcagcagtgatcattataacttcacaaaaaaagatgctgacggatttacttacagggccttaatgttattttgtcccagccaacaccctctaggtcctaaaagtcaaggtacttcagtttatttggcaaacatgacaacattttttttggccctgggcccaacagtttgtacttcatgaaacatattgtacattttacatagtttaatttaaaaaataccttttaagctagttgatctttgactgtcttatttattataacctttcagcacattccaaggttttagttactcaggaaggagttaattaaaatgattttattttggtctgatggatgttttttaaaaggaaaattattattatgaaccttcagcctactttcttgagtgccgtaaaagtgcttgtaaatctttttttttttttaagaagaaagaaaaaaatggtgtttgacgttgatggaaattcaaaaatatatatggaactgaaacattaacttagctaaaataaaagcaatctgtgtttgaaaaaa

SEQ ID NO: 119 - protein, 406 aa, homo sapiens
MKKKQQHPGGGADPWPHGAPMGGAPPGLGSWKRRVPLLPFLRFSLRDYGFCMATLLVFCLGSLLYQLSGGPPRFLLDLRQYLGNSTYLDDHGPPPSKVLPFPSQVVYNRVGKCGSRTVVLLLRILSEKHGFNLVTSDIHNKTRLTKNEQMELIKNISTAEQPYLFTRHVHFLNFSRFGGDQPVYINIIRDPVNRFLSNYFFRRFGDWRGEQNHMIRTPSMRQEERYLDINECILENYPECSNPRLFYIIPYFCGQHPRCREPGEWALERAKLNVNENFLLVGILEELEDVLLLLERFLPHYFKGVLSIYKDPEHRKLGNMTVTVKKTVPSPEAVQILYQRMRYEYEFYHYVKEQFHLLKRKFGLKSHVSKPPLRPHFFIPTPLETEEPIDDEEQDDEKWLEDIYKR

SEQ ID NO: 120 - DNA, 2826 bp, homo sapiens
acaagggtggcagcctggctctgaagtggaattatgtgcttcaaacaggttgaaagagggaaacagtcttttcctgcttccagacatgaatcaggtcactattcaatgggatgcagtaatagccctttacatactcttcagctggtgtcatggaggaattacaaatataaactgctctggccacatctgggtagaaccagccacaatttttaagatgggtatgaatatctctatatattgccaagcagcaattaagaactgccaaccaaggaaacttcatttttataaaaatggcatcaaagaaagatttcaaatcacaaggattaataaaacaacagctcggctttggtataaaaactttctggaaccacatgcttctatgtactgcactgctgaatgtcccaaacattttcaagagacactgatatgtggaaaagacatttcttctggatatccgccagatattcctgatgaagtaacctgtgtcatttatgaatattcaggcaacatgacttgcacctggaatgctgggaagctcacctacatagacacaaaatacgtggtacatgtgaagagtttagagacagaagaagagcaacagtatctcacctcaagctatattaacatctccactgattcattacaaggtggcaagaagtacttggtttgggtccaagcagcaaacgcactaggcatggaagagtcaaaacaactgcaaattcacctggatgatatagtgataccttctgcagccgtcatttccagggctgagactataaatgctacagtgcccaagaccataatttattgggatagtcaaacaacaattgaaaaggtttcctgtgaaatgagatacaaggctacaacaaaccaaacttggaatgttaaagaatttgacaccaattttacatatgtgcaacagtcagaattctacttggagccaaacattaagtacgtatttcaagtgagatgtcaagaaacaggcaaaaggtactggcagccttggagttcactgttttttcataaaacacctgaaacagttccccaggtcacatcaaaagcattccaacatgacacatggaattctgggctaacagttgcttccatctctacagggcaccttacttctgacaacagaggagacattggacttttattgggaatgatcgtctttgctgttatgttgtcaattctttctttgattgggatatttaacagatcattccgaactgggattaaaagaaggatcttattgttaataccaaagtggctttatgaagatattcctaatatgaaaaacagcaatgttgtgaaaatgctacaggaaaatagtgaacttatgaataataattccagtgagcaggtcctatatgttgatcccatgattacagagataaaagaaatcttcatcccagaacacaagcctacagactacaagaaggagaatacaggacccctggagacaagagactacccgcaaaactcgctattcgacaatactacagttgtatatattcctgatctcaacactggatataaaccccaaatttcaaattttctgcctgagggaagccatctcagcaataataatgaaattacttccttaacacttaaaccaccagttgattccttagactcaggaaataatcccaggttacaaaagcatcctaattttgctttttctgtttcaagtgtgaattcactaagcaacacaatatttcttggagaattaagcctcatattaaatcaaggagaatgcagttctcctgacatacaaaactcagtagaggaggaaaccaccatgcttttggaaaatgattcacccagtgaaactattccagaacagaccctgcttcctgatgaatttgtctcctgtttggggatcgtgaatgaggagttgccatctattaatacttattttccacaaaatattttggaaagccacttcaataggatttcactcttggaaaagtagagctgtgtggtcaaaatcaatatgagaaagctgccttgcaatctgaacttgggttttccctgcaatagaaattgaattctgcctctttttgaaaaaaatgtattcacatacaaatcttcacatggacacatgttttcatttcccttggataaatacctaggtaggggattgctgggccatatgataagcatatgtttcagttctaccaatcttgtttccagagtagtgacatttctgtgctcctaccatcaccatgtaagaattcccgggagctccatgcctttttaattttagccattcttctgcctcatttcttaaaattagagaattaaggtcccgaaggtggaacatgcttcatggtcacacatacaggcacaaaaacagcattatgtggacgcctcatgtattttttatagagtcaactatttcctctttattttccctcattgaaagatgcaaaacagctctctattgtgtacagaaagggtaaataatgcaaaatacctggtagtaaaataaatgctgaaaattttcctttaaaatagaatcattaggccaggcgtggtggctcatgcttgtaatcccagcactttggtaggctgaggtaggtggatcacctgaggtcaggagttcgagtccagcctggccaatatgctgaaaccctgtctctactaaaattacaaaaattagccggccatggtggcaggtgcttgtaatcccagctacttgggaggctgaggcaggagaatcacttgaaccaggaaggcagaggttgcactgagctgagattgtgccactgcactccagcctgggcaacaagagcaaaactctgtctggaaaaaaaaaaaaaa

SEQ ID NO: 121 - protein, 629 aa, homo sapiens
MNQVTIQWDAVIALYILFSWCHGGITNINCSGHIWVEPATIFKMGMNISIYCQAAIKNCQPRKLHFYKNGIKERFQITRINKTTARLWYKNFLEPHASMYCTAECPKHFQETLICGKDISSGYPPDIPDEVTCVIYEYSGNMTCTWNAGKLTYIDTKYVVHVKSLETEEEQQYLTSSYINISTDSLQGGKKYLVWVQAANALGMEESKQLQIHLDDIVIPSAAVISRAETINATVPKTIIYWDSQTTIEKVSCEMRYKATTNQTWNVKEFDTNFTYVQQSEFYLEPNIKYVFQVRCQETGKRYWQPWSSLFFHKTPETVPQVTSKAFQHDTWNSGLTVASISTGHLTSDNRGDIGLLLGMIVFAVMLSILSLIGIFNRSFRTGIKRRILLLIPKWLYEDIPNMKNSNVVKMLQENSELMNNNSSEQVLYVDPMITEIKEIFIPEHKPTDYKKENTGPLETRDYPQNSLFDNTTVVYIPDLNTGYKPQISNFLPEGSHLSNNNEITSLTLKPPVDSLDSGNNPRLQKHPNFAFSVSSVNSLSNTIFLGELSLILNQGECSSPDIQNSVEEETTMLLENDSPSETIPEQTLLPDEFVSCLGIVNEELPSINTYFPQNILESHFNRISLLEK

SEQ ID NO: 122 - DNA, 1606 bp, homo sapiens
actaagtatctccactttcaattctagatcaggaactgaggacatatctaaattttctagttttatagaaggcttttatccacaagaatcaagatcttccctctctgagcaggaatcctttgtgcattgaagactttagattcctctctgcggtagacgtgcacttataagtatttgatggggtggattcgtggtcggaggtctcgacacagctgggagatgagtgaatttcataattataacttggatctgaagaagagtgatttttcaacacgatggcaaaagcaaagatgtccagtagtcaaaagcaaatgtagagaaaatgcatctccattttttttctgctgcttcatcgctgtagccatgggaatccgtttcattattatggtaacaatatggagtgctgtattcctaaactcattattcaaccaagaagttcaaattcccttgaccgaaagttactgtggcccatgtcctaaaaactggatatgttacaaaaataactgctaccaattttttgatgagagtaaaaactggtatgagagccaggcttcttgtatgtctcaaaatgccagccttctgaaagtatacagcaaagaggaccaggatttacttaaactggtgaagtcatatcattggatgggactagtacacattccaacaaatggatcttggcagtgggaagatggctccattctctcacccaacctactaacaataattgaaatgcagaagggagactgtgcactctatgcctcgagctttaaaggctatatagaaaactgttcaactccaaatacgtacatctgcatgcaaaggactgtgtaaagatgatcaaccatctcaataaaagccaggaacagagaagagattacaccagcggtaacactgccaactgagactaaaggaaacaaacaaaaacaggacaaaatgaccaaagactgtcagatttcttagactccacaggaccaaaccatagaacaatttcactgcaaacatgcatgattctccaagacaaaagaagagagatcctaaaggcaattcagatatccccaaggctgcctctcccaccacaagcccagagtggatgggctgggggaggggtgctgttttaatttctaaaggtaggaccaacacccaggggatcagtgaaggaagagaaggccagcagatcactgagagtgcaaccccaccctccacaggaaattgcctcatgggcagggccacagcagagagacacagcatgggcagtgccttccctgcctgtgggggtcatgctgccacttttaatgggtcctccacccaacggggtcagggaggtggtgctgccccagtgggccatgattatcttaaaggcattattctccagccttaagtaagatcttaggacgtttcctttgctatgatttgtacttgcttgagtcccatgactgtttctcttcctctctttcttccttttggaatagtaatatccatcctatgtttgtcccactattgtattttggaagcacataacttgtttggtttcacaggttcacagttaagaaggaattttgcctctgaataaatagaatcttgagtctcatgcaaaaaaaaaaaaaaaaaa

SEQ ID NO: 123 - protein, 216 aa, homo sapiens
MGWIRGRRSRHSWEMSEFHNYNLDLKKSDFSTRWQKQRCPVVKSKCRENASPFFFCCFIAVAMGIRFIIMVTIWSAVFLNSLFNQEVQIPLTESYCGPCPKNWICYKNNCYQFFDESKNWYESQASCMSQNASLLKVYSKEDQDLLKLVKSYHWMGLVHIPTNGSWQWEDGSILSPNLLTIIEMQKGDCALYASSFKGYIENCSTPNTYICMQRTV

SEQ ID NO: 124 - DNA, 3254 bp, Homo sapiens
agcaggaagctcgcgccgccgtcgccgccgccgctcagcttccccgggcgcgtccaggacccgctgcgccaggcgcgccgtccccggacccggcgtgcgtccctacgaggaaagggaccccgccgctcgagccgcctccgccagccccactgcgaggggtcccagagccagccgcgcccgccctcgcccccggccccgcagccttcccgccctgcgcgccatgaacgcccccgagcggcagccccaacccgacggcggggacgccccaggccacgagcctgggggcagcccccaagacgagcttgacttctccatcctcttcgactatgagtatttgaatccgaacgaagaagagccgaatgcacataaggtcgccagcccaccctccggacccgcataccccgatgatgtcctggactatggcctcaagccatacagcccccttgctagtctctctggcgagccccccggccgattcggagagccggatagggtagggccgcagaagtttctgagcgcggccaagccagcaggggcctcgggcctgagccctcggatcgagatcactccgtcccacgaactgatccaggcagtggggcccctccgcatgagagacgcgggcctcctggtggagcagccgcccctggccggggtggccgccagcccgaggttcaccctgcccgtgcccggcttcgagggctaccgcgagccgctttgcttgagccccgctagcagcggctcctctgccagcttcatttctgacaccttctccccctacacctcgccctgcgtctcgcccaataacggcgggcccgacgacctgtgtccgcagtttcaaaacatccctgctcattattcccccagaacctcgccaataatgtcacctcgaaccagcctcgccgaggacagctgcctgggccgccactcgcccgtgccccgtccggcctcccgctcctcatcgcctggtgccaagcggaggcattcgtgcgccgaggccttggttgccctgccgcccggagcctcaccccagcgctcccggagcccctcgccgcagccctcatctcacgtggcaccccaggaccacggctccccggctgggtacccccctgtggctggctctgccgtgatcatggatgccctgaacagcctcgccacggactcgccttgtgggatcccccccaagatgtggaagaccagccctgacccctcgccggtgtctgccgccccatccaaggccggcctgcctcgccacatctacccggccgtggagttcctggggccctgcgagcagggcgagaggagaaactcggctccagaatccatcctgctggttccgcccacttggcccaagccgctggtgcctgccattcccatctgcagcatcccagtgactgcatccctccctccacttgagtggccgctgtccagtcagtcaggctcttacgagctgcggatcgaggtgcagcccaagccacatcaccgggcccactatgagacagaaggcagccgaggggctgtcaaagctccaactggaggccaccctgtggttcagctccatggctacatggaaaacaagcctctgggacttcagatcttcattgggacagctgatgagcggatccttaagccgcacgccttctaccaggtgcaccgaatcacggggaaaactgtcaccaccaccagctatgagaagatagtgggcaacaccaaagtcctggagatacccttggagcccaaaaacaacatgagggcaaccatcgactgtgcggggatcttgaagcttagaaacgccgacattgagctgcggaaaggcgagacggacattggaagaaagaacacgcgggtgagactggttttccgagttcacatcccagagtccagtggcagaatcgtctctttacagactgcatctaaccccatcgagtgctcccagcgatctgctcacgagctgcccatggttgaaagacaagacacagacagctgcctggtctatggcggccagcaaatgatcctcacggggcagaactttacatccgagtccaaagttgtgtttactgagaagaccacagatggacagcaaatttgggagatggaagccacggtggataaggacaagagccagcccaacatgctttttgttgagatccctgaatatcggaacaagcatatccgcacacctgtaaaagtgaacttctacgtcatcaatgggaagagaaaacgaagtcagcctcagcactttacctaccacccagtcccagccatcaagacggagcccacggatgaatatgaccccactctgatctgcagccccacccatggaggcctggggagccagccttactacccccagcacccgatggtggccgagtccccctcctgcctcgtggccaccatggctccctgccagcagttccgcacggggctctcatcccctgacgcccgctaccagcaacagaacccagcggccgtactctaccagcggagcaagagcctgagccccagcctgctgggctatcagcagccggccctcatggccgccccgctgtcccttgcggacgctcaccgctctgtgctggtgcacgccggctcccagggccagagctcagccctgctccacccctctccgaccaaccagcaggcctcgcctgtgatccactactcacccaccaaccagcagctgcgctgcggaagccaccaggagttccagcacatcatgtactgcgagaatttcgcaccaggcaccaccagacctggcccgcccccggtcagtcaaggtcagaggctgagcccgggttcctaccccacagtcattcagcagcagaatgccacgagccaaagagccgccaaaaacggacccccggtcagtgaccaaaaggaagtattacctgcgggggtgaccattaaacaggagcagaacttggaccagacctacttggatgatgagctgatagacacacaccttagctggatacaaaacatattatgaaacagaatgactgtgatctttgatccgagaaatcaaagttaaagttaatgaaattatcaggaaggagttttcaggacctcctgccagaaatcagacgtaaaagaagccattatagcaagacaccttctgtatctgacccctcggagccctccacagcccctcaccttctgtctcctttcatgttcatctcccagcccggagtccacacgcggatcaatgtatgggcactaagcggactctcacttaaggagctcgccacctccctcta

SEQ ID NO: 125 - protein, 921 aa, Homo sapiens
MNAPERQPQPDGGDAPGHEPGGSPQDELDFSILFDYEYLNPNEEEPNAHKVASPPSGPAYPDDVLDYGLKPYSPLASLSGEPPGRFGEPDRVGPQKFLSAAKPAGASGLSPRIEITPSHELIQAVGPLRMRDAGLLVEQPPLAGVAASPRFTLPVPGFEGYREPLCLSPASSGSSASFISDTFSPYTSPCVSPNNGGPDDLCPQFQNIPAHYSPRTSPIMSPRTSLAEDSCLGRHSPVPRPASRSSSPGAKRRHSCAEALVALPPGASPQRSRSPSPQPSSHVAPQDHGSPAGYPPVAGSAVIMDALNSLATDSPCGIPPKMWKTSPDPSPVSAAPSKAGLPRHIYPAVEFLGPCEQGERRNSAPESILLVPPTWPKPLVPAIPICSIPVTASLPPLEWPLSSQSGSYELRIEVQPKPHHRAHYETEGSRGAVKAPTGGHPVVQLHGYMENKPLGLQIFIGTADERILKPHAFYQVHRITGKTVTTTSYEKIVGNTKVLEIPLEPKNNMRATIDCAGILKLRNADIELRKGETDIGRKNTRVRLVFRVHIPESSGRIVSLQTASNPIECSQRSAHELPMVERQDTDSCLVYGGQQMILTGQNFTSESKVVFTEKTTDGQQIWEMEATVDKDKSQPNMLFVEIPEYRNKHIRTPVKVNFYVINGKRKRSQPQHFTYHPVPAIKTEPTDEYDPTLICSPTHGGLGSQPYYPQHPMVAESPSCLVATMAPCQQFRTGLSSPDARYQQQNPAAVLYQRSKSLSPSLLGYQQPALMAAPLSLADAHRSVLVHAGSQGQSSALLHPSPTNQQASPVIHYSPTNQQLRCGSHQEFQHIMYCENFAPGTTRPGPPPVSQGQRLSPGSYPTVIQQQNATSQRAAKNGPPVSDQKEVLPAGVTIKQEQNLDQTYLDDELIDTHLSWIQNIL

SEQ ID NO: 126 - DNA, 4858 bp, Homo sapiens
gcatcagaaagctccgcagttcttgagttccacatgcagagcagatgcgacagctagaagtgagtagggcccagaccctggcccaggaagatccactaaaggaggccatccttccgccttcttctgcaggagtcaggatggaaaggcagatgtaaagtccctcatggcgaaatataacacggggggcaacccgacagaggatgtctcagtcaatagccgacccttcagagtcacagggccaaactcatcttcaggaatacaagcaagaaagaacttattcaacaaccaaggaaatgccagccctcctgcaggacccagcaatgtacctaagtttgggtccccaaagccacctgtggcagtcaaaccttcttctgaggaaaagcctgacaaggaacccaagcccccgtttctaaagcccactggagcaggccaaagattcggaacaccagccagcttgaccaccagagaccccgaggcgaaagtgggatttctgaaacctgtaggccccaagcccatcaacttgcccaaagaagattccaaacctacatttccctggcctcctggaaacaagccatctcttcacagtgtaaaccaagaccatgacttaaagccactaggcccgaaatctgggcctactcctccaacctcagaaaatgaacagaagcaagcgtttcccaaattgactggggttaaagggaaatttatgtcagcatcacaagatcttgaacccaagcccctcttccccaaacccgcctttggccagaagccgcccctaagtaccgagaactcccatgaagacgaaagccccatgaagaatgtgtcttcatcaaaagggtccccagctcccctgggagtcaggtccaaaagcggccctttaaaaccagcaagggaagactcagaaaataaagaccatgcaggggagatttcaagtttgccctttcctggagtggttttgaaacctgctgcgagcaggggaggcccaggtctctccaaaaatggtgaagaaaaaaaggaagataggaagatagatgctgctaagaacaccttccagagcaaaataaatcaggaagagttggcctcagggactcctcctgccaggttccctaaggccccttctaagctgacagtgggggggccatggggccaaagtcaggaaaaggaaaagggagacaagaattcagccaccccgaaacagaagccattgcctcccttgtttaccttgggtccacctccaccaaaacccaacagaccaccaaatgttgacctgacgaaattccacaaaacctcttctggaaacagtactagcaaaggccagacgtcttactcaacaacttccctgccaccacctccaccatcccatccggccagccaaccaccattgccagcatctcacccatcacaaccaccagtcccaagcctacctcccagaaacattaaacctccgtttgacctaaaaagccctgtcaatgaagacaatcaagatggtgtcacgcactctgatggtgctggaaatctagatgaggaacaagacagtgaaggagaaacatatgaagacatagaagcatccaaagaaagagagaagaaaagggaaaaggaagaaaagaagaggttagagctggagaaaaaggaacagaaagagaaagaaaagaaagaacaagaaataaagaagaaatttaaactaacaggccctattcaagtcatccatcttgcaaaagcttgttgtgatgtcaaaggaggaaagaatgaactgagcttcaagcaaggagagcaaattgaaatcatccgcatcacagacaacccagaaggaaaatggttgggcagaacagcaaggggttcatatggctatattaaaacaactgctgtagagattgactatgattctttgaaactgaaaaaagactctcttggtgccccttcaagacctattgaagatgaccaagaagtatatgatgatgttgcagagcaggatgatattagcagccacagtcagagtggaagtggagggatattccctccaccaccagatgatgacatttatgatgggattgaagaggaagatgctgatgatggctccacactacaggttcaagagaagagtaatacgtggtcctgggggattttgaagatgttaaagggaaaagatgacagaaagaaaagtatacgagagaaacctaaagtctctgactcagacaataatgaaggttcatctttccctgctcctcctaaacaattggacatgggagatgaagtttacgatgatgtggatacctctgatttccctgtttcatcagcagagatgagtcaaggaactaatgttggaaaagctaagacagaagaaaaggaccttaagaagctaaaaaagcaggaaaaagaagaaaaagacttcaggaaaaaatttaaatatgatggtgaaattagagtcctatattcaactaaagttacaacttccataacttctaaaaagtggggaaccagagatctacaggtaaaacctggtgaatctctagaagttatacaaaccacagatgacacaaaagttctctgcagaaatgaagaagggaaatatggttatgtccttcggagttacctagcggacaatgatggagagatctatgatgatattgctgatggctgcatctatgacaatgactagcactcaactttggtcattctgctgtgttcattaggtgccaatgtgaagtctggattttaattggcatgttattgggtatcaagaaaattaatgcacaaaaccacttattatcatttgttatgaaatcccaattatctttacaaagtgtttaaagtttgaacatagaaaataatctctctgcttaattgttaactcagaagactacattagtgagatgtaagaattattaaatattccatttccgctttggctacaattatgaagaagttgaaggtacttcttttagaccaccagtaaataatcctccttcaaaaaataaaaataaaagaaaaaggaaaatcattcaggaagaaatgacctgtctaaaaaaacctaaggaagaataataatataagaaaggaaatttaaaaacattccacaagaagaaaaattattgtttatacttctacttatggttatatcttatattctctattcaagtgacctgtcttttaaaaaggcagtgctgtcttacctcttgctagtgggttaaatgttttcaaaaattatagcagtagtagaagttttgtataaaatttgtccttatttgttaattgtatataaatgttaattatttgatacgaatgttatgcatttagtatgcacattgaagtctaaactgtagaagagtctaaaacaagttctctttttgcagattcacatactaatggtttaattctgtgctctgtttaaagtactattataactagagtagatctgaatgaggataaccctaaaatcatgaggaatggaagaatggaccttgaaactacctaggcttttatgcatggcacctctttataatgaagacactttttaaagtttttgtttttgtttcaattaccgctagatttttttttctctttttttaaaatccattttactggaaagttggccagcagagggagtagaaattattaaaattctagtgtttggattgggcccttctctaacagtacatactcattcccaaagcaatccaaaaacaaaatgtgaaccatttgggtttcaaatgttaagaacactaaatagcatgatttaaaaaatgaaaaatgctaacacccaagaaaagaagatattaagtgctttttaacaactcctagagtacaaaatgagtacatcataatgctggctcttctactaatgaaccatcgagtgatattgaataaattatttatcttctcagtttccttatctgtaaattacaatattagactaagtaagtttttccaactcttcactaccaattaccttaggcttttataatgctccgcctacttcagtcccatgtttcagaagcttttgtctattttttaaactcattgattaaataatgattaatgcattctccacattttaatattgcaaaggcccattggagtttctgaagtggctccacagaattgaaataatttcaaataactgtaaaggaactgaaaatcttcacagagatgaagtggggtttccattaggtgctttgaaatttgataacaaatcatcaacttccactggtcaatatatagattttgggtgtctgaggccccaagattagatgccactaatctccaaagattccctccaattatgaaatattttaatgtctacttttagagagcactagccagtatatgaccatgtgattaatttcttttcacactagataaaattacctggttcaaaagtggtttttgtttattaaatttggtaataaatatatataatacacagacaggatagtttttatgctgaagtttttggccagctttagtttgaggactccttgataagcttgctaaactttcagagtgccctgagacacttccagccatccctcctcctgccttcattggggcagacttgcattgcagtctgacagtaattttttttctgattgagaattatgtaaattcagtacaatgtcagtttttaaaagtcaaagttagatcaagagaatatttcagagttttggtttacacatcaagaaacagacacacatacctaggaaagatttacacaatagataatcatcttaatgtgaaagatatttgaagtattaattttaatatattaaatatgatttctgttatagtcttctgtatggaattttgtcacttaagatgagctgcaaataaataataccttcaatggataaaaaaaaaaaaaaaa

SEQ ID NO: 127 - protein, 829 aa, Homo sapiens
MAKYNTGGNPTEDVSVNSRPFRVTGPNSSSGIQARKNLFNNQGNASPPAGPSNVPKFGSPKPPVAVKPSSEEKPDKEPKPPFLKPTGAGQRFGTPASLTTRDPEAKVGFLKPVGPKPINLPKEDSKPTFPWPPGNKPSLHSVNQDHDLKPLGPKSGPTPPTSENEQKQAFPKLTGVKGKFMSASQDLEPKPLFPKPAFGQKPPLSTENSHEDESPMKNVSSSKGSPAPLGVRSKSGPLKPAREDSENKDHAGEISSLPFPGVVLKPAASRGGPGLSKNGEEKKEDRKIDAAKNTFQSKINQEELASGTPPARFPKAPSKLTVGGPWGQSQEKEKGDKNSATPKQKPLPPLFTLGPPPPKPNRPPNVDLTKFHKTSSGNSTSKGQTSYSTTSLPPPPPSHPASQPPLPASHPSQPPVPSLPPRNIKPPFDLKSPVNEDNQDGVTHSDGAGNLDEEQDSEGETYEDIEASKEREKKREKEEKKRLELEKKEQKEKEKKEQEIKKKFKLTGPIQVIHLAKACCDVKGGKNELSFKQGEQIEIIRITDNPEGKWLGRTARGSYGYIKTTAVEIDYDSLKLKKDSLGAPSRPIEDDQEVYDDVAEQDDISSHSQSGSGGIFPPPPDDDIYDGIEEEDADDGSTLQVQEKSNTWSWGILKMLKGKDDRKKSIREKPKVSDSDNNEGSSFPAPPKQLDMGDEVYDDVDTSDFPVSSAEMSQGTNVGKAKTEEKDLKKLKKQEKEEKDFRKKFKYDGEIRVLYSTKVTTSITSKKWGTRDLQVKPGESLEVIQTTDDTKVLCRNEEGKYGYVLRSYLADNDGEIYDDIADGCIYDND

SEQ ID NO: 128 - DNA, 5266 bp, Homo sapiens
gcttaaaaatttctgtgtcttacacagaagatagaaaaaatagagtgtctccaattggatggattttttaaaaaatttggttattgtaatggatttattttttcttagagctgagctgattgtactttggccaactaatgggttaatactgtcaagggaaattagccctgactaaacattgccgctggctcatgaatgcactaggcttggggcagtataaaaactcagagaaatcagtgtgtaggagacacagaaatcagtgtcactcagtgacagaagcaacaataattgtgaaaaatacttcagcagttatggactcatctgtcattcaaaggaaaaaagtagctgtcattggtggtggcttggttggctcattacaagcatgctttcttgcaaagaggaatttccagattgatgtatatgaagctagggaagatactcgagtggctaccttcacacgtggaagaagcattaacttagccctttctcatagaggacgacaagccttgaaagctgttggcctggaagatcagattgtatcccaaggtattcccatgagagcaagaatgatccactctctttcaggaaaaaagtctgcaattccctatgggacaaagtctcagtatattctttctgtaagcagagaaaatctaaacaaggatctattgactgctgctgagaaataccccaatgtgaaaatgcactttaaccacaggctgttgaaatgtaatccagaggaaggaatgatcacagtgcttggatctgacaaagttcccaaagatgtcacttgtgacctcattgtaggatgtgatggagcctattcaactgtcagatctcacctgatgaagaaacctcgctttgattacagtcagcagtacattcctcatgggtacatggagttgactattccacctaagaacggagattatgccatggaacctaattatctgcatatttggcctagaaatacctttatgatgattgcacttcctaacatgaacaaatcattcacatgtactttgttcatgccctttgaagagtttgaaaaacttctaaccagtaatgatgtggtagatttcttccagaaatactttccggatgccatccctctaattggagagaaactcctagtgcaagatttcttcctgttgcctgcccagcccatgatatctgtaaagtgctcttcatttcactttaaatctcactgtgtactgctgggagatgcagctcatgctatagtgccgttttttgggcaaggaatgaatgcgggctttgaagactgcttggtatttgatgagttaatggataaattcagtaacgaccttagtttgtgtcttcctgtgttctcaagattgagaatcccagatgatcacgcgatttcagacctatccatgtacaattacatagagatgcgagcacatgtcaactcaagctggttcatttttcagaagaacatggagagatttcttcatgcgattatgccatcgacctttatccctctctatacaatggtcactttttccagaataagataccatgaggctgtgcagcgttggcattggcaaaaaaaggtgataaacaaaggactctttttcttgggatcactgatagccatcagcagtacctacctacttatacactacatgtcaccacgatctttcctccgcttgagaagaccatggaactggatagctcacttccggaatacaacatgtttccccgcaaaggccgtggactccctagaacaaatttccaatctcattagcaggtgatagaaaggttttgtggtagcaaatgcatgatttctctgtgaccaaaattaagcatgaaaaaaatgtttccattgccatatttgattcactagtggaagatagtgttctgcttataattaaactgaatgtagagtatctctgtatgttaattgcaattactggttggggggtgcattttaaaagatgaaacatgcagcttccctacattacacacactcaggttgagtcattctaactataaaagtgcaatgactaagatccttcacttctctgaaagtaaggccctagatgcctcagggaagacagtaatcatgccttttctttaaaagacacaataggactcgcaacagcattgactcaacacctaggactaaaaatcacaacttaactagcatgttaactgcacttttcattacgtgaatggaacttacctaaccacagggctcagacttactagataaaaccagaaatggaaataaggaattcaggggagttccagagacttacaaaatgaactcattttattttcccaccttcaaatataagtattatcatctatctgtttatcgtctatctatctatcatctatctatctatctatcatctatctatctatctatctatctatctatctatctatctatctctatttatttatgtatttagagatcaggtctcactctgttgaccaggctggagtgcagtggtgagatctgggttcactgcaacctctgcctcctgggctcaagcaatcctcccacttcagcctcccaaatagctggggctaccatggtatttttcagtagagaccgggtcttgccatgctgcccaggccagtctcaaactcctggcctcatgtgatctgcccacctcagcctcccaaagtacagggattagagttgtgagccaccgctgccagcccagagttaccctctaaagataagaaaaaggctattaatatcatactaagtgaaggacaggaaagggttttattcataaattaaatgtctacatgtgccagaatggaaaggaaacaaggggagacaacttttatagaaatacaaagccattactttattcaatttcagaccctcagaagcaatttactaatttattcttcgactacatactgcagcagaaccagcaatacacttgatttttaaaagcacatttagtgaaatgttttctttggttcatccttctttaacaggctgctgagtcactcagaaatccttcaaacatgattaattatgaagatgaaacactagagtcatataagaaataaaaattgggcaataaaataaaatgattcagtgtttcttttctatattgtcaatgaaaaccttgagttctaataatccatgttcagtttgtagggaaagaaaaaataatttttccttctacccactttaggttccttggctggggcccctataacaaaagacagattgacaagagaaaaacaaacataaatttattagcgggtatatgtaatatatatgtgggaaatacaggggaatgagcaaatctcaaagagctggcgtcttagaactccctggcttatatagcatcgacaaagaacagtaaatttttagagaaacaacaaaacaaagaaaaagagctttgagtctgtaggggcagcaatttgggggaagcaaatatatgggagtttgccttgtagattcctctggtgctggtctccaggctgacaaggattcaaagttgtctctgaaactcctctttgtcatactgcacatataaaacgtcttttgtttccaacaagaggattttctttttcattctagaattatctccttgataacttgatcagatataggacatgacactgaatagagtccaacagtacaaaaaaaattcagtatgttctagctacttcacacatgtgtacgcgacagttatttttacagtaaggtattttcgagaaaaatgcattacgtgttttggaaaatagagtaatttaaaaaatatatttgaaatgaaaatctccaacacattagaagatgatgatgttagatgcccatcgtgtgccacaagtggttttttcattatgtaaagcacccgttgaattaaaagaatttgtttttgttcaacctcttcctgaggcccaagagcatatgggcaattcggatttcctgctggaccacaaggttctgttgatattacatagaacgggtattccagacacttcttatgatgaaagtccaaaagtggcatccaatttaaggccccatctttcgttgccattcttcattcctacaaaggacgaacttggattacatcaactttggacccattggttttgtcgctgtcgtcaactgacagtgattcatcactggtgatgataaaaatgatggaagaagagttgaaagtcacttttttctttggcctgtccccatctttctgtgacatcacaatgggtctgatctgcatttcacttccagctgctggtaggtctttagcaggcctctggcacctcagcagtcggaggcacagaagctgcaaaagggatcttcgaaactgggcagagaaaaaataaagtggaatattaagtaaaagttgggcactaatctggattaacattcgaggaaatcagttgagctgaatttaagttgttttttgtttgttagcaggtgtggatgtggggttatgtggtcatgctcagatctacctaaatcaccccagagctttatgtcttttattcattctaattcttattaaccggaatatgtaggaccatttcaataccttgtaatcctccaagcttcaatctgcacacactttctatgagggcaggtacaactattaagagattttgaacattaagttagtccacaaatattcagtgggcatctactaggtgacagccactgtgctataattagagactttttactataagcatcaaaaacagataaggctcttcctggcagagtttacagcctggtgtacttgctaatgtctctttaattaggtgaagaattttttttttctatcgaaattactaatcagttggggaaaaaaatactatagcagacagcactaatgtcatcaacaaacattgttcttctccgtgtcctgggtacaacatcgaataatatttcttggcctcctttccgcttctcctctctgctgttcctctctacaagaacctgggaggccaacgcctaaagatcataatatcacacaatggaaggaacctagattcctaaatgactgcataggacagatcccatctcctccacccaatacattattagactgaactgtgacctgaaatgagcaataaactctgtattaattcactgaaatgttggggttgcttgttatagtagtcggtccatcatgaccagtaaaacataaatcaaaagttaatgtaattgttatcccattatttagagcgaaataaatgttgaatatatggactttctcagattaggaaataccaattaaaaatataataaatagctacattg

SEQ ID NO: 129 - protein, 486 aa, Homo sapiens
MDSSVIQRKKVAVIGGGLVGSLQACFLAKRNFQIDVYEAREDTRVATFTRGRSINLALSHRGRQALKAVGLEDQIVSQGIPMRARMIHSLSGKKSAIPYGTKSQYILSVSRENLNKDLLTAAEKYPNVKMHFNHRLLKCNPEEGMITVLGSDKVPKDVTCDLIVGCDGAYSTVRSHLMKKPRFDYSQQYIPHGYMELTIPPKNGDYAMEPNYLHIWPRNTFMMIALPNMNKSFTCTLFMPFEEFEKLLTSNDVVDFFQKYFPDAIPLIGEKLLVQDFFLLPAQPMISVKCSSFHFKSHCVLLGDAAHAIVPFFGQGMNAGFEDCLVFDELMDKFSNDLSLCLPVFSRLRIPDDHAISDLSMYNYIEMRAHVNSSWFIFQKNMERFLHAIMPSTFIPLYTMVTFSRIRYHEAVQRWHWQKKVINKGLFFLGSLIAISSTYLLIHYMSPRSFLRLRRPWNWIAHFRNTTCFPAKAVDSLEQISNLISR

SEQ ID NO: 130 - DNA, 3060 bp, Homo sapiens
acacagagccgcctttcagccgcccgagaactgcccgccgcactccgcgactgcggcgcctgctctcgggccggggtctgcgcgcaccacgcggccggcagaaagggtaagagaagggaaccccgctttgcagggctccaacttcggcggacgcgttacggcgagggcgaaatgagtcggccgtgaacggtgtttcctgttccgaatcccgagagccctggaaagttttgaaggaggaggcatggcccggcagccttatcgttttccccaggcaaggattccggagagaggatcaggtgttttcaggttaaccgtcagaaacgcaatggcacatcgtgattctgagatgaaagaagaatgtctaagggaagacctgaagttttacttcatgagcccttgtgaaaaataccgagccagacgccagattccgtggaaactgggtttgcagattttgaagatagtcatggtcaccacacagcttgttcgttttggtttaagtaaccagctggtggttgctttcaaagaagataacactgttgcttttaagcacttgtttttgaaaggatattctggtacagatgaagatgactacagctgcagtgtatatactcaagaggatgcctatgagagcatcttttttgctattaatcagtatcatcagctaaaggacattaccctggggacccttggttatggagaaaatgaagacaatagaattggcttaaaagtctgtaagcagcattacaagaaagggaccatgtttccttctaatgagacactgaatattgacaacgacgttgagctcgattgtgttcaattagaccttcaggacctctccaagaagcctccggactggaagaactcatcattcttcagactggaattttatcggctcttacaggttgaaatctcctttcatcttaaaggcattgacctacagacaattcattcccgtgagttaccagactgttatgtctttcagaatacgattatctttgacaataaagctcacagtggcaaaatcaaaatctattttgacagtgatgccaaaattgaagaatgtaaagacttgaacatatttggatctactcagaaaaatgctcagtatgtcctggtgtttgatgcatttgtcattgtgatttgcttggcatctcttattctgtgtacaagatccattgttcttgctctaaggttacggaagagatttctaaatttcttcctggagaagtacaagcggcctgtgtgtgacaccgaccagtgggagttcatcaacggctggtatgtcctggtgattatcagcgacctaatgacaatcattggctccatattaaaaatggaaatcaaagcaaagaatctcacaaactatgatctctgcagcatttttcttggaacctctacgctcttggtttgggttggagtcatcagatacctgggttatttccaggcatataatgtgctgattttaacaatgcaggcctcactgccaaaagttcttcggttttgtgcttgtgctggtatgatttatctgggttacacattctgtggctggattgtcttaggaccataccatgacaagtttgaaaatctgaacacagttgctgagtgtctgttttctctggtcaacggtgatgacatgtttgcaacctttgcccaaatccagcagaagagcatcttggtgtggctgttcagtcgtctgtatttatattccttcatcagcctttttatatatatgattctcagtctttttattgcacttattacagattcttatgacaccattaagaaattccaacagaatgggtttcctgaaacggatttgcaggaattcctgaaggaatgcagtagcaaagaagagtatcagaaagagtcctcagccttcctgtcctgcatctgctgtcggaggaggaaaagaagtgatgatcacttgatacctattagctaaagttctgctaaagatgattaaagttcaggcatccttatccagcggctgagcagaggaaccccaaatgacttggacaagcagttccaaaatgactctcttatttaattgtggagtgggaaagaggactcacagttagccagctgaccatgactgaagttccagctttactttttataaacttgaatgataaagaatagaccatgggctactactgggcattagtgcaatataacagcgataataaaattctctattagtctgttaatttatgacatgatctcggaatggaaaaagatcatttcagagtgtgcgaaataatagtctttaaccatgtaattaaatatgtgtgtttattgtcaaataaggatttgttttaaaggtgattcttgggtttgaagacatttgttaattcatggtctgtacagaaatgaagctggttgcaataccaatctagagagtccaagctggcgaactattaagctgtttaaagatcacccttggcctggcacagtggttcacacctgtaatcccagcactttgggaggcctaggcaggcagactgagctcaggagcttgagaccagcctgggcaacatggcaaaaacccacctctacaaaaagtacaaaaattagtcgggcgtgatggcaggcatctgtagtcccagctacttgggaagctgaagtgggaggatcacctgagctctggaggtggaggctgccatgagccatgatcgtgccactacactccagcctgggtgacagagtgagatcctgtctcaaaaaaaaaaaaaaatcacccttaaatcaacaaaaagacctcatgctcatgcagtggacatttcttggcctgttttcctgtgggttttcttcagcatgatatgaagcaactgttggcatagccagtgggataaataagaaatggaatcatttggctgcctcgtcacttgtgctaatggtcagttgtacacacatgacatgtggaagtgacctgtagcagcggtcactcattttaacaattgaactctgctgggttgggtatttacctttgtctagaaaagaaatatgatatattttctctaaataaatttattttcatcattccaaaaaaaaaaaaaaaaa

SEQ ID NO: 131 - protein, 566 aa, homo sapiens
MARQPYRFPQARIPERGSGVFRLTVRNAMAHRDSEMKEECLREDLKFYFMSPCEKYRARRQIPWKLGLQILKIVMVTTQLVRFGLSNQLVVAFKEDNTVAFKHLFLKGYSGTDEDDYSCSVYTQEDAYESIFFAINQYHQLKDITLGTLGYGENEDNRIGLKVCKQHYKKGTMFPSNETLNIDNDVELDCVQLDLQDLSKKPPDWKNSSFFRLEFYRLLQVEISFHLKGIDLQTIHSRELPDCYVFQNTIIFDNKAHSGKIKIYFDSDAKIEECKDLNIFGSTQKNAQYVLVFDAFVIVICLASLILCTRSIVLALRLRKRFLNFFLEKYKRPVCDTDQWEFINGWYVLVIISDLMTIIGSILKMEIKAKNLTNYDLCSIFLGTSTLLVWVGVIRYLGYFQAYNVLILTMQASLPKVLRFCACAGMIYLGYTFCGWIVLGPYHDKFENLNTVAECLFSLVNGDDMFATFAQIQQKSILVWLFSRLYLYSFISLFIYMILSLFIALITDSYDTIKKFQQNGFPETDLQEFLKECSSKEEYQKESSAFLSCICCRRRKRSDDHLIPIS

SEQ ID NO: 132 - DNA, 1687 bp, homo sapiens
cgatcgaggctgcagcgcggccgccgggcgcagcatgactgccgtcggcgtgcaggcccagaggcctttgggccaaaggcagccccgccggtccttctttgaatccttcatccggaccctcatcatcacgtgtgtggccctggctgtggtcctgtcctcggtctccatttgtgatgggcactggctcctggctgaggaccgcctcttcgggctctggcacttctgcaccaccaccaaccagacgatctgcttcagagacctgggccaggcccatgtgcccgggctggccgtgggcatgggcctggtacgcagcgtgggcgccttggccgtggtggccgccatttttggcctggagttcctcatggtgtcccagttgtgcgaggacaaacactcacagtgcaagtgggtcatgggttccatcctcctcctggtgtctttcgtcctctcctccggcgggctcctgggttttgtgatcctcctcaggaaccaagtcacactcatcggcttcaccctaatgttttggtgcgaattcactgcctccttcctcctcttcctgaacgccatcagcggccttcacatcaacagcatcacccatccctgggaatgaccgtggaaattttaggccccctccagggacatcagattccacaagaaaatatggtcaaaatgggacttttccagcatgtggcctctggtggggctgggttggacaagggccttgaaacggctgcctgtttgccgataacttgtgggtggtcagccagaaatggcccgggggcctctgcacctggtctgcagggccagaggccaggagggtgcctcagtgccaccaactgcacaggcttagccagatgttgattttagaggaagaaaaaaacattttaaaactccttcttgaattttcttccctggactggaatacagttggaagcacaggggtaactggtacctgagctagctgcacagccaaggatagttcatgcctgtttcattgacacgtgctgggataggggctgcagaatccctggggctcccagggttgttaagaatggatcattcttccagctaagggtccaatcagtgcctaggactttcttccaccagctcaaagggccttcgtatgtatgtccctggcttcagctttggtcatgccaaagaggcagagttcaggattccctcagaatgccctgcacacagtaggtttccaaaccatttgactcggtttgcctccctgcccgttgtttaaaccttacaaaccctggataaccccatcttctagcagctggctgtgcctctgggagctctgcctatcagaaccctaccttaaggtgggtttccttccgagaagagttcttgagcaagctctcccaggagggcccacctgactgctaatacacagccctccccaaggcccgtgtgtgcatgtgtctgtcttttgtgagggttagacagcctcagggcaccatttttaatcccagaacacatttcaaagagcacgtatctagacctgctggactctgcagggggtgagggggaacagcgagagcttgggtaatgattaacacccatgctggggatgcatggaggtgaagggggccaggaaccagtggagatttccatccttgccagcacgtctgtacttctgttcattaaagtgctccctttctagtcctttttctgcccagaa

SEQ ID NO: 133 - protein, 190 aa, homo sapiens
MTAVGVQAQRPLGQRQPRRSFFESFIRTLIITCVALAVVLSSVSICDGHWLLAEDRLFGLWHFCTTTNQTICFRDLGQAHVPGLAVGMGLVRSVGALAVVAAIFGLEFLMVSQLCEDKHSQCKWVMGSILLLVSFVLSSGGLLGFVILLRNQVTLIGFTLMFWCEFTASFLLFLNAISGLHINSITHPWE

SEQ ID NO: 134 - DNA, 5929 bp, homo sapiens
tttctttttaaaaatcgctgggtctgttgagctgtcctgggctgggtgccttgctctttgactgagactggagacagacggcaacagccacaggcagactgaggtggcaataggaaatctgccgagatgttcagtcaggtgcccaggaccccagcctcaggctgctactacctaaattccatgacacctgagggccaggagatgtacttgcgatttgatcagactacaagacgctctccttacaggatgagccggattctagcacgccatcagctagtgactaaaattcaacaagaaattgaggcaaaagaagcatgtgactggctccgtgctgccgggttcccgcaatacgctcagttatatgaggattcacaatttcccatcaacattgtggctgtcaagaatgatcatgattttcttgaaaaggaccttgtagaacctctttgcagacgactaaatacgttgaacaagtgtgcctcaatgaaacttgatgtgaacttccaaaggaaaaagggtgacgactccgatgaggaagatctttgtatcagcaacaaatggactttccaaagaaccagtcgcaggtggtctcgtgtggacgacctctacacgctgctccctcgaggagacagaaatgggtcaccgggaggcacggggatgaggaacacgaccagcagtgagagcgtcctcacagacctgagcgagcctgaggtctgctccattcacagcgaaagcagtggaggcagcgacagtcgcagccagccgggccagtgctgtacagacaacccggtcatgctggatgccccactcgtcagcagcagcctcccacagccccccagagatgtcctcaaccaccccttccaccccaagaatgagaagcccacgagggctagggccaaatcatttttgaaacgcatggaaacactccgagggaagggagcccacgggaggcataaggggtctgggcggacaggtggcctggtgatcagtgggcccatgttgcagcaggagccagagtcctttaaggctatgcagtgcatccaaataccaaatggagatctccagaattcgccgccacctgcctgcagaaaagggctcccatgctctggcaagtcgagtggcgagagcagcccgtcggagcacagcagcagcggggtgagcacgccctgcctgaaggaacgcaagtgccacgaggccaacaagcgcgggggcatgtacttggaggacctagatgtgctggcggggacagcactgccggatgcaggggaccaaagccgtatgcatgaatttcactcccaagagaatttggtggtgcatattcccaaggatcacaaaccaggaacattccccaaggcactttctattgaaagcctctctcccacagatagtagcaatggggttaattggaggaccggtagcatctccctgggcagagagcaggtccctggtgccagggagccccggctcatggcgtcctgccacagagccagccgagtcagtatctatgacaatgtccctggctcccatctgtatgccagcacaggagatcttttggacttggagaaagatgaccttttccctcacttggatgacattctgcagcatgtcaatgggctccaagaggtagtcgatgactggtccaaagatgtcttgcctgaactgcaaactcatgatacattggttggggaacctggcttatccacctttccatctcctaatcagatcaccttagattttgaaggtaactctgtctcagaaggtcggacgacacccagtgatgtggaaagagatgtaacatctcttaatgaatctgagcctcctggggtcagagacaggagggattctggtgtaggggcctctctgaccaggccaaacaggcgactccgatggaacagtttccagctgtcgcaccagccccggccggccccagcatcgccccacatcagcagccagacggccagccagctgagcctgctccagcgcttctcactgctccgcctcacggccatcatggagaagcactccatgtccaacaagcacggctggacatggtcagttccaaagttcatgaagaggatgaaagttcccgactacaaagacaaggctgtctttggcgttcctctcatagtccacgtccaaagaacgggacagcccctgcctcaaagtattcagcaagcactgagatatctacgcagcaactgcctcgatcaggtgggtctttttcgcaaatcaggagtgaagtctcgaatccatgcccttcgccaaatgaatgaaaacttccctgagaacgtcaactatgaagaccagtctgcttatgatgtggcggatatggtgaaacagttcttccgggacctccctgagcctcttttcaccaacaagctcagtgagacctttctccatatctatcagtatgtctccaaagagcagcggctgcaggccgtgcaggctgccatcctgctactggccgatgagaacagggaggtcctgcagacgctcttgtgtttcctgaacgacgtcgtcaacttggtggaagagaatcagatgacgcccatgaacctggcagtgtgtctggccccctccctctttcatcttaatttattgaagaaagaaagctctccacgagtcatacagaagaaatatgccactgggaagccagatcaaaaggacctcaacgagaatctggcagcagctcaggggctagcgcacatgatcatggaatgcgacagactttttgaggttccacacgagttggtggcccagtctcgtaactcgtatgtggaggctgagatccacgtgccaaccctggaagaattggggacacagctggaggagagtggggcaactttccacacttacctgaaccatctcatccagggcctccagaaagaagccaaggagaagttcaaaggatgggtcacgtgctccagcacggacaatacagatcttgctttcaaaaaggtgggcgacgggaacccgctgaagctgtggaaggcttctgtggaggtggaagcacccccctcagtggtcctgaaccgcgtgctgagagagcgccacctgtgggacgaggactttgtgcagtggaaggttgtggaaactctagacaggcaaacagagatctaccagtatgtgctgaacagcatggctccccatccttccagagactttgtggttctcaggacctggaaaactgatttgcccaaaggaatgtgtaccctggtgtccctctccgtggagcatgaggaagcccagctcctgggtggtgtgcgagcagtggtgatggactcgcagtacttgatagaaccgtgtggctctggcaagtcaagactgactcacatctgcaggatagacctgaaaggtcactccccagaatggtacagcaaaggctttggacatctgtgtgcagcagaagttgccaggattagaaactctttccagcccctcattgctgagggcccagaaactaaaatctgagttttgcccagtgtgacatcaaactcagggaagaggaagctaaagtgacgagtgtggcagagagtgtgcatgtgagaaagcgagagaaagaggaactgaaggacgcggttaatgcctaaaaatggaaacgttaagaagttggaatgttggagatgcaagaatttccaagaactttcttagccttcctggagatggctacatccctactaatataattttaaaatgagaactttatatatattacttaaaattaaatggactattccttgtgcattgcctaatttgctatttaaaggcttctaagaagcgtatacctaactgtaaataaatgtatgtatagcatatgtacatatgtgtgtatatctccatctttactgtatatatgtaaaataccaattttatatagaattgtgtgttttgaaaatgacggtgtctgactcagtgagtcccttcctcacacagttctttccaagtggctctgggccccatctctccactgtcctgtaagctgtgcagaacctgctgctaacaccaaggtgtgaacatgccctgatgcctaaccaaagatgagttaaccaaaggaaaataacattaaaggagacttatgtgttaacgctttgtttctgctattcaaaaactgagagtggagatctgggataaagcaaggaaataataattactcctccttaaagcaaatgggggggtgagaagtcattaccaaatttaaagctagatgaggagttgccactgggcccagtaagatggaatttcagtgagatatggaccaccggagtcagcgagagtgactgaaacagaagcgatacctctcgctcccatgcccatcactacagaccccaagtcaagatgaatatcatagcctttacttcttcacagccaaagggagcccctgtgttgtctcaagtttttataaatacatttcataatgttattaaatgtcattctatttgaccagtggcctatttggtcacagttaattggtgttttcttattgcactgaattcaactccagacaccatacaaagggagatgatggccattccgttcaaatcctagatcgttacagcttcagggaattcatattttgttatgtgtaggatactcttaaaatgtaattcattaaacttttacaatctgaaagacagggtttttaactaacatgagaccaaaactatgttctttgattagttttagatagtataatcgggtttattaattcttctgtgtttcttcactagccagtccaagctacctatgcatttgacccaaccttatttattattgtacagatgaagcgaattgactccctttagccaactgctaatggatcgaatgtgctttttattgtaattcaacagctatagagagaaagataacttattgtgtgtttgatttcagggagagagattttctttggtcatccataatagagattgataagatttagcaactggtgttggagaaaaaaagaaaagcaaatgagtgttttcaggtttttttgcattatatgcatttatgtaatgtttctgttatcagcaatgtgcaattattttattgagaggaataaaaaagctttctatgagtttggtatggtgcgaggaaaatcttacagtttgaattatgacctagaaatttttcattcccatatctacctaagaaggaagcagtaaatccataatttaccttttgggcaatgctttgtgagcaaaacaaagtcacttctgccataacatcttgaatttaaccatatatgccagattactttatatgcatcaacaagatcaccagtgaagtttaatctagctaaacactggtcctgctcctgagatgggatcctatgtgtttggaaaacgtgataggcacacgaggatgagtggctttgtatcgcccagagaggtgcttgtccagatttcacatgcacatgaattgcctggggatcttgtgaaactgcagactctgctccaagtaatctgggctgggcctgagattctgcatttctaaggagtctcagggatgcctatgctgctggcctaaaaccacactcagaaacgaggacctagaagatccctaaaacagaataagaacaaatgtgattgtatttctgattctccctctcttcgaattatctgacttttttgtttttgtgcacatagtaatcatatcaccgctgcataacaacacagtgcatctttttaaaacaaggaaaagggaaaaaaaggagaaaaaacgatgcatcaagcttgtttgtcaaataccacagtattttattcattgttatcttgccaatggaaataaagtatgatattgcatttaaatattatatttatacctcatgtatatttttacctcaattgttgatatcaatcatcaattgtaaataaataattgccaaggcaaataaatttatatatattaaatatttcctattttctataaaataaaa

SEQ ID NO: 135 - protein, 1113 aa, homo sapiens
MFSQVPRTPASGCYYLNSMTPEGQEMYLRFDQTTRRSPYRMSRILARHQLVTKIQQEIEAKEACDWLRAAGFPQYAQLYEDSQFPINIVAVKNDHDFLEKDLVEPLCRRLNTLNKCASMKLDVNFQRKKGDDSDEEDLCISNKWTFQRTSRRWSRVDDLYTLLPRGDRNGSPGGTGMRNTTSSESVLTDLSEPEVCSIHSESSGGSDSRSQPGQCCTDNPVMLDAPLVSSSLPQPPRDVLNHPFHPKNEKPTRARAKSFLKRMETLRGKGAHGRHKGSGRTGGLVISGPMLQQEPESFKAMQCIQIPNGDLQNSPPPACRKGLPCSGKSSGESSPSEHSSSGVSTPCLKERKCHEANKRGGMYLEDLDVLAGTALPDAGDQSRMHEFHSQENLVVHIPKDHKPGTFPKALSIESLSPTDSSNGVNWRTGSISLGREQVPGAREPRLMASCHRASRVSIYDNVPGSHLYASTGDLLDLEKDDLFPHLDDILQHVNGLQEVVDDWSKDVLPELQTHDTLVGEPGLSTFPSPNQITLDFEGNSVSEGRTTPSDVERDVTSLNESEPPGVRDRRDSGVGASLTRPNRRLRWNSFQLSHQPRPAPASPHISSQTASQLSLLQRFSLLRLTAIMEKHSMSNKHGWTWSVPKFMKRMKVPDYKDKAVFGVPLIVHVQRTGQPLPQSIQQALRYLRSNCLDQVGLFRKSGVKSRIHALRQMNENFPENVNYEDQSAYDVADMVKQFFRDLPEPLFTNKLSETFLHIYQYVSKEQRLQAVQAAILLLADENREVLQTLLCFLNDVVNLVEENQMTPMNLAVCLAPSLFHLNLLKKESSPRVIQKKYATGKPDQKDLNENLAAAQGLAHMIMECDRLFEVPHELVAQSRNSYVEAEIHVPTLEELGTQLEESGATFHTYLNHLIQGLQKEAKEKFKGWVTCSSTDNTDLAFKKVGDGNPLKLWKASVEVEAPPSVVLNRVLRERHLWDEDFVQWKVVETLDRQTEIYQYVLNSMAPHPSRDFVVLRTWKTDLPKGMCTLVSLSVEHEEAQLLGGVRAVVMDSQYLIEPCGSGKSRLTHICRIDLKGHSPEWYSKGFGHLCAAEVARIRNSFQPLIAEGPETKI

SEQ ID NO: 136 - DNA, 2757 bp, homo sapiens
gacaagtactgagtgaactcaaaccctctgtaaagtaacagaagttagaaggggaaatgtcgcctctctgaagattacccaaagaaaaagtgatttgtcattgctttatagactgtaagaagagaacatctcagaagtggagtcttaccctgaaatcaaaggatttaaagaaaaagtggaatttttcttcagcaagctgtgaaactaaatccacaacctttggagacccaggaacaccctccaatctctgtgtgttttgtaaacatcactggagggtcttctacgtgagcaattggattgtcatcagccctgcctgttttgcacctgggaagtgccctggtcttacttgggtccaaattgttggctttcacttttgaccctaagcatctgaagccatgggccacacacggaggcagggaacatcaccatccaagtgtccatacctcaatttctttcagctcttggtgctggctggtctttctcacttctgttcaggtgttatccacgtgaccaaggaagtgaaagaagtggcaacgctgtcctgtggtcacaatgtttctgttgaagagctggcacaaactcgcatctactggcaaaaggagaagaaaatggtgctgactatgatgtctggggacatgaatatatggcccgagtacaagaaccggaccatctttgatatcactaataacctctccattgtgatcctggctctgcgcccatctgacgagggcacatacgagtgtgttgttctgaagtatgaaaaagacgctttcaagcgggaacacctggctgaagtgacgttatcagtcaaagctgacttccctacacctagtatatctgactttgaaattccaacttctaatattagaaggataatttgctcaacctctggaggttttccagagcctcacctctcctggttggaaaatggagaagaattaaatgccatcaacacaacagtttcccaagatcctgaaactgagctctatgctgttagcagcaaactggatttcaatatgacaaccaaccacagcttcatgtgtctcatcaagtatggacatttaagagtgaatcagaccttcaactggaatacaaccaagcaagagcattttcctgataacctgctcccatcctgggccattaccttaatctcagtaaatggaatttttgtgatatgctgcctgacctactgctttgccccaagatgcagagagagaaggaggaatgagagattgagaagggaaagtgtacgccctgtataacagtgtccgcagaagcaaggggctgaaaagatctgaaggtcccacctccatttgcaattgacctcttctgggaacttcctcagatggacaagattaccccaccttgccctttacgtatctgctcttaggtgcttcttcacttcagttgctttgcaggaagtgtctagaggaatatggtgggcacagaagtagctctggtgaccttgatcaaggtgttttgaaatgcagaattcttgagttctggaagggactttagagaataccagtgttattaatgacaaaggcactgaggcccagggaggtgacccgaattataaaggccagcgccagaacccagatttcctaactctggtgctctttccctttatcagtttgactgtggcctgttaactggtatatacatatatatgtcaggcaaagtgctgctggaagtagaatttgtccaataacaggtcaacttcagagactatctgatttcctaatgtcagagtagaagattttatgctgctgtttacaaaagcccaatgtaatgcataggaagtatggcatgaacatctttaggagactaatggaaatattattggtgtttacccagtattccatttttttcattgtgttctctattgctgctctctcactcccccatgaggtacagcagaaaggagaactatccaaaactaatttcctctgacatgtaagacgaatgatttaggtacgtcaaagcagtagtcaaggaggaaagggatagtccaaagacttaactggttcatattggactgataatctctttaaatggctttatgctagtttgacctcatttgtaaaatatttatgagaaagttctcatttaaaatgagatcgttgtttacagtgtatgtactaagcagtaagctatcttcaaatgtctaaggtagtaactttccatagggcctccttagatccctaagatggctttttctccttggtatttctgggtctttctgacatcagcagagaactggaaagacatagccaactgctgttcatgttactcatgactcctttctctaaaactgccttccacaattcactagaccagaagtggacgcaacttaagctgggataatcacattatcatctgaaaatctggagttgaacagcaaaagaagacaacatttctcaaatgcacatctcatggcagctaagccacatggctgggatttaaagcctttagagccagcccatggctttagctacctcactatgctgcttcacaaaccttgctcctgtgtaaaactatattctcagtgtagggcagagaggtctaacaccaacataaggtactagcagtgtttcccgtattgacaggaatacttaactcaataattcttttcttttccatttagtaacagttgtgatgactatgtttctattctaagtaattcctgtattctacagcagatactttgtcagcaatactaagggaagaaacaaagttgaaccgtttctttaataa

SEQ ID NO: 137 - protein, 288 aa, homo sapiens
MGHTRRQGTSPSKCPYLNFFQLLVLAGLSHFCSGVIHVTKEVKEVATLSCGHNVSVEELAQTRIYWQKEKKMVLTMMSGDMNIWPEYKNRTIFDITNNLSIVILALRPSDEGTYECVVLKYEKDAFKREHLAEVTLSVKADFPTPSISDFEIPTSNIRRIICSTSGGFPEPHLSWLENGEELNAINTTVSQDPETELYAVSSKLDFNMTTNHSFMCLIKYGHLRVNQTFNWNTTKQEHFPDNLLPSWAITLISVNGIFVICCLTYCFAPRCRERRRNERLRRESVRPV

SEQ ID NO: 138 - protein, 139 aa, homo sapiens
MAAGSSGASMGWRGSPGRPSGRSQHCPRTSSACARWARYRGSFQGFYPNSTYFYLFSLELFCLYLSFICKNSIRKIHRVNAHQAYRRSGRNMFSPAHFQSVFEHRGFHGFDSFHKRLVLSVFTIYVSETINYIIFMFTH

SEQ ID NO: 139 - DNA, 7948 bp, homo sapiens
agatgcacagtggagctcgctacccctcctctcctccaaaaatctcatcagacgatatcccagacaggagcggttagagagagaggaatcacatctccacacagttttagggtgctttttatttttacaaatcttcttgtgtgttttttgccttgatccatcctcttcccgccgagatcgtatggcgcctttctctcgattatgaatttgatcaatccatctttggaagaaaacccacatagttttttcaggagctgaaaattgagtcgttatagaaatattaggacatattttcaatcatttcggtgcccgaagggaggcaagagctcagttttatattgagacattacgccggctgaaggcagagaatgcgtttccctgccaggacctgatgcaatccattcaagccaacaagtttggagagaatgttgagttcaatcaattcagaacgtcgagatggagcccaactcactccagtgggtcggctcaccgtgtggcttgcacggaccttacattttctacaaggcttttcaattccaccttgaaggcaaaccaagaattttgtcccttggcgactttttctttgtaagatgtacgccaaaggatccgatttgcatagcggagctccagctgttgtgggaagagaggaccagccggcaacttttatccagctctaaactttatttcctcccagaagacactccccagggcagaaatagcgaccatggcgaggatgaagtcattgctgtttccgaaaaggtgattgtgaagcttgaagacctggtcaagtgggtacattctgatttctccaagtggagatgtggcttccacgctggaccagtgaaaactgaggccttgggaaggaatggacagaaggaagctctgctgaagtacaggcagtcaaccctaaacagtggactcaacttcaaagacgttctcaaggagaaggcagacctgggggaggacgaggaagaaacgaacgtgatagttctcagctacccccagtactgccggtaccgctcgatgctgaaacgcatccaggataagccatcttccattctaacggaccagtttgcattggccctggggggcattgcagtggtcagcaggaaccctcagatcctgtactgtcgggacacctttgaccacccgactctcatagaaaacgagagtatatgcgatgagtttgcgccaaatcttaaaggcagaccacgcaaaaagaaaccatgcccacaaagaagagattcattcagtggtgttaaggattccaacaacaattccgatggcaaagccgttgccaaggtgaaatgtgaggccaggtcagccttgaccaagccgaagaataaccataactgtaaaaaagtctcaaatgaagaaaaaccaaaggttgccattggtgaagagtgcagggcagatgaacaagccttcttggtggcactttataaatacatgaaagaaaggaaaacgccgatagaacgaataccctatttaggttttaaacagattaacctttggactatgtttcaagctgctcaaaaactgggaggatatgaaacaataacagcccgccgtcagtggaaacatatttatgatgaattaggcggtaatcctgggagcaccagcgctgccacttgtacccgcagacattatgaaagattaatcctaccatatgaaagatttattaaaggagaagaagataagcccctgcctccaatcaaacctcggaaacaggagaacagttcacaggaaaatgagaacaaaacaaaagtatctggaaccaaacgcatcaaacatgaaatacctaaaagcaagaaagaaaaagaaaatgccccaaagccccaggatgcagcagaggtttcatcagagcaagaaaaagaacaagagactttaataagccagaaaagcatccctgagcctctcccagcagcagacatgaagaaaaaaatagaagggtatcaggaattttcagcgaagcccctggcatccagagtagacccagagaaggacaacgaaacagaccaaggttccaacagtgagaaggtggcagaggaggcgggagagaaggggcccacacctccactcccaagtgctcctctggccccagaaaaagattcagccttggtccctggggccagcaaacagccactcacctctcctagtgccctggtggactcaaaacaagaatccaaactgtgctgttttacagagagccctgaaagtgaaccccaagaagcatccttccccagcttccccaccacacagccaccgctggcaaaccagaatgagacggaggatgacaaactgcccgccatggcagattacattgccaactgcaccgtgaaggtggaccagctgggcagtgacgacatccacaatgcgctcaagcagaccccaaaggtccttgtggtccagtcgtttgacatgttcaaagacaaagacctgactgggcccatgaacgagaaccatggacttaattacacgcccctgctctactctaggggcaacccaggcatcatgtccccactggccaagaaaaagcttttgtcccaagtgagtggggccagcctctccagcagctacccttatggctccccaccccctttgatcagcaaaaagaaactgattgctagggatgacttgtgttccagtttgtcccagacccaccatggccaaagcactgaccatatggcggtcagccggccatcagtgattcagcacgtccagagtttcagaagcaagccctcggaagagagaaagaccatcaatgacatctttaagcatgagaaactgagtcgatcagatccccaccgctgcagcttctccaagcatcaccttaacccccttgctgactcctacgtcctgaagcaagaaattcaggagggcaaggataaactcttagagaaaagggccctcccccattcccacatgcctagcttcctggctgacttctactcgtcccctcatctccatagcctctacagacacaccgagcaccatcttcataatgaacagacatccaaatacccttccagggacatgtacagggaatcggaaaacagttcttttccttcccacagacaccaagaaaagctccatgtaaattatctcacgtccctgcacctgcaagacaaaaagtcggcggcagcagaagcccctacggatgatcagcctacagatctgagccttcccaagaacccgcacaaacctaccggcaaggtcctgggcctggctcattccaccacagggccccaggagagcaaaggcatctcccagttccaggtcttaggcagccagagtcgagactgtcaccccaaagcctgtcgggtatcacccatgaccatgtcaggccctaaaaaataccctgaatcgctttcaagatcaggaaaacctcaccatgtgagactggagaatttcaggaagatggaaggcatggtccacccaatcctgcaccggaaaatgagcccgcagaacattggggcggcgcggccgatcaagcgcagcctggaggatttggaccttgtgattgcagggaaaaaggcccgggcagtgtctcccttagacccatccaaggaggtctctgggaaggagaaggcctctgagcaggagagtgaaggcagcaaagcagcgcacggtgggcattccgggggcggatcagaaggccacaagcttcccctctcctcccctatcttcccaggtctgtattccgggagcctgtgtaactcgggcctcaactccaggctcccggctgggtattctcattctctgcagtacttgaaaaaccagactgtgctttctccactcatgcagcccctggctttccactcgcttgtgatgcaaagaggaatttttacatcaccgacaaattctcagcagctgtacagacacttggctgcggctacacctgtaggaagttcatatggggaccttttgcataacagcatttaccctttagctgctataaatcctcaagctgcctttccatcttcccagctgtcatccgtgcaccccagtacaaaactgtaggctcagctctgcccagcagtccaaagcggcatggccaacagagcttcactccttacccaggagtgctggcttatagagttagaagtcagtatttcttctaatctgaggctatgatcagtcccagctgtaggggcccagaggggaggtgaacatgcctgatttttgtgggacaactctagcccacaaactgactggctggtgagtcttgactcccttccaacacagatgcccaggcacctccagatcattcacttcgcacgtgggccttgtgaagggatttgtgaatatccaggaagaacttagaggaccccatctgagttcggatggtcaggaaacaatctgggcaaaaaagaggcaggcatttcaaaggaaggggcaaggaagactggcaaacagatggcaagggatgcccctctttttcataaaactctccaaggttcaatcaatgcaatgtatagtgaaacttcaatagatctttcattttgacactattaaacaatccagagaagtaaacactgttaaattgactgtatatatttgcttcttaaaactacctgtatcactgtttgctcacctaatttatatacaggtagttccattttctcccagttccttctcgtctttttttttttttttttttttttttttattaaatggtattgcttttgtttgcaggtctttttgtttttgttttgtttttgaggctgactgactgtcctagttgttgtgtgtttgtaatttttccacatcttattttgagcagctttgggtggtaaagttattgtttacaaattgaagcaactgattctagtggaacaaatgaaaaagaaacagtcaagcacacaatagtgcaaagaacgttcctttgtagatccgcaacttaaggattttgttcctcataaatggcatagttgaaagagcttatacactgcttacccagccaaatgctttgctttgaagtattgggttctgtgaaaatattgagcattgtacttaccttatctaggctgtgaaactgtcctacataccagagaatcataaaaacaaaaacctcactggcagcaagctgccgaataacaacagagtctagaggacatatttgtgggctgcacagatattttaggaatttcagaaattagaacaggagccaaaatgatttacattggcgttggcactgattcctttaaatggtctgggaaagggggttgggaagaggatggagctcaactggccagaagaggagcagctgcagtcctgatagcttctctagcctcggtcttttgagtgataagtagtcatgttgttttcatccagttggtttcttgtcattcccaagaagaatctcccaggccacatctttggggataactgacatactggattagccttttcaaaagaaaagtcatcctatttggttttatggggtgtgagttttgtgtgtacacacacagaaacatgtaaggtggtttgggtcatgtttttaaccacctggcaatacagtccactttctggtttcttttattgtgggaagtaaatggtcaagctgctcaggcagtgaaaagatgtggagaatgtccgttgtcattcttgccactgtattccatttgctaccgagatataacattaaggtggacacattttctaactgtattaattaaaagtcaatggatacagagagtggattttctccccaagtcccatccctgctgaagaccgcttggatgaactccccaacccactgtgcccctcccgcaacactaccagtagactttagaaccatagttaactaagtcttttacctctgagatacttaattctgggaaaattggtgacaattttcaacttctaaataggtaactcgactgcaaaataatcaaaactgataacaatgaaactgcggctcttaaacaaagccatgcatgccgtgcatttgtattgaaatgtctccatgatatgaagccaaatattcaatgtaacatacttaatatccaaaggtggaaacaaaagaatgtagagatccagtgttaagagttccatttgcttcaattaattatttaccttcctgtggaataatatatatatatatatttaatagaaccatagatagactagtagaatttagattataaatgtgtgagtgcagattatcctgctattgcacaagctagaggggggaaaaatctcaattccagctggcaagatgctagccaggacacatataagaaagttgcactagattgaatggtcacagaatcggaggacatggaagaaaaaggaaacttcggtggttctgcagcagacatgggctaggtcatatgtggtttctatgagttcgtgtctcaaaaaaaaaaggagggggggcatctgtccccggtggagctcacctatttggaatatggggcatttgttttttccactgcaatgatttcagtctggtttcatcatgttggaattcgatcacaccattttcaaacaatgttaacatagtccagcttttgtttttctcatctcttctgagaggagactcactgtttctgtctgaggaagctcataccctcggcaaaacatcaggacaaataaagagaaatgggggtacgcattcccaacagaagcagtgtgttatttgttttaaaactctgaacagagatcttggaaatctttcaaaaagaccattgaattcttcattggctgagaacgacgttttaaaatgtcttaaataaggctttgtttgcattgtttgagttcaaggggccttattattgaatggaattgcacaagcctttctttgtgcaatcaaaccattgttattggtagttctgtaaaggaaactgtggaatcgaattggcagtggagtcataaatctatttactgagtgtggcttccaagaaatgttgcaattcaaaatgcactaagtctgtgatttattggagatttggagattctaaataatatttttaaaaaacttccatgcaacttctggtttaatgtttggcaactccacatgataaaaaaataaaaacagcccaaccgagtttcggaattaagtattcttctagtaagtgattcaaacttgtaatatttgccacaggactgacttatttatttactagctagaagctcttaagttcacttgtttatcagggcatatacagaagggtttgttaaaactcgatgttaactttacaactttctgacctggtgcatgaattctcaagtactgtatttcactgtgttggtgtgtctgatggaaatttcgaggtggtcccacaaaaatattttatgtagtgtgccttcaaagagaaccatttatttctcttcacttatcgtcccacaaagtcacatttggtggtggtcagccaagtcgcatctggtctagttttactcttgtcccaattttaaagagaaatgggaatgagtttgccctggtgagacccataccattgcaatgattatcttgagcacttaaagtccagtgttggctgttagtgtatttgatattctgcctgtctcctcatggttgaaatatgtctgaagaatagcagcataatctcttggctgtttatacttttttaaactttcctgtgttgtaaatattgtatacttttggtgattccagctatgtaacctctatgctctgtaaggtgattatttgtatatagcaacatggcccagtgatattatatagtttcccaatggagaggttattgagtaacctttgcattagtttaaacactaccagaagaatgctgagccaactataaacactcaattttgtatgttttccaaattgtacttattactgcttttgatactgtattacgtgccaatagtttcccaatcacatagcaggcaagagatattttgtactttttgatccactgtaatatttaataaaaaatgttactatctgtttcctttaaaaaaa

SEQ ID NO: 140 - protein, 1188 aa, homo sapiens
MEPNSLQWVGSPCGLHGPYIFYKAFQFHLEGKPRILSLGDFFFVRCTPKDPICIAELQLLWEERTSRQLLSSSKLYFLPEDTPQGRNSDHGEDEVIAVSEKVIVKLEDLVKWVHSDFSKWRCGFHAGPVKTEALGRNGQKEALLKYRQSTLNSGLNFKDVLKEKADLGEDEEETNVIVLSYPQYCRYRSMLKRIQDKPSSILTDQFALALGGIAVVSRNPQILYCRDTFDHPTLIENESICDEFAPNLKGRPRKKKPCPQRRDSFSGVKDSNNNSDGKAVAKVKCEARSALTKPKNNHNCKKVSNEEKPKVAIGEECRADEQAFLVALYKYMKERKTPIERIPYLGFKQINLWTMFQAAQKLGGYETITARRQWKHIYDELGGNPGSTSAATCTRRHYERLILPYERFIKGEEDKPLPPIKPRKQENSSQENENKTKVSGTKRIKHEIPKSKKEKENAPKPQDAAEVSSEQEKEQETLISQKSIPEPLPAADMKKKIEGYQEFSAKPLASRVDPEKDNETDQGSNSEKVAEEAGEKGPTPPLPSAPLAPEKDSALVPGASKQPLTSPSALVDSKQESKLCCFTESPESEPQEASFPSFPTTQPPLANQNETEDDKLPAMADYIANCTVKVDQLGSDDIHNALKQTPKVLVVQSFDMFKDKDLTGPMNENHGLNYTPLLYSRGNPGIMSPLAKKKLLSQVSGASLSSSYPYGSPPPLISKKKLIARDDLCSSLSQTHHGQSTDHMAVSRPSVIQHVQSFRSKPSEERKTINDIFKHEKLSRSDPHRCSFSKHHLNPLADSYVLKQEIQEGKDKLLEKRALPHSHMPSFLADFYSSPHLHSLYRHTEHHLHNEQTSKYPSRDMYRESENSSFPSHRHQEKLHVNYLTSLHLQDKKSAAAEAPTDDQPTDLSLPKNPHKPTGKVLGLAHSTTGPQESKGISQFQVLGSQSRDCHPKACRVSPMTMSGPKKYPESLSRSGKPHHVRLENFRKMEGMVHPILHRKMSPQNIGAARPIKRSLEDLDLVIAGKKARAVSPLDPSKEVSGKEKASEQESEGSKAAHGGHSGGGSEGHKLPLSSPIFPGLYSGSLCNSGLNSRLPAGYSHSLQYLKNQTVLSPLMQPLAFHSLVMQRGIFTSPTNSQQLYRHLAAATPVGSSYGDLLHNSIYPLAAINPQAAFPSSQLSSVHPSTKL

SEQ ID NO: 141 - DNA, 4454 bp, homo sapiens
gacgctcgaggggcgctcggctagtcccgccagagcgcgagccgccagcccgtaacggtcgccagtgtgaggggcgggagggaaagaagaggggtttaaattagattttttaaaacacagagcaagcgccagaggcgtcggcatcccaggtgtcgccgcttcctgctgcacagggctcggcgtacaggtccctccctcctcaagccccctccccttctcccgccctaccctctggggctctgcggcgcttaagaggcggccgcagcggcggatccggcggctgctgcagcccgggcggctgccgagaaggagggaggggaaacacaaagccggctacgcgctgcgagataacaagagtaatccacagacttaaaacatgagctcagatgccagccaaggcgtgattaccactcctcctcctcccagcatgcctcacaaagagagatattttgaccgcatcaatgaaaatgacccagaatacattagggagaggaacatgtctcctgatctacgacaagacttcaacatgatggagcagaggaaacgagttactcagatcctgcaaagtcctgcctttcgggaagacttggaatgccttattcaagaacagatgaagaaaggccacaacccaactggattactagcattacagcagattgcagattacatcatggccaattctttctcgggtttttcttcacctcctctcagtcttggcatggtcacacctatcaatgaccttcctggtgcagatacatcctcatatgtgaagggagaaaaacttactcgctgtaaacttgccagcctgtacagacttgtagacttgtttggatgggcacacctggcaaatacctatatctcagtaagaataagtaaggagcaagaccacattataataattcccagaggcctatctttttctgaagctacagcctccaatttggtgaaagtcaatataataggagaagtggttgaccagggaagtaccaatttgaaaattgaccatacaggattcagtccccatgctgcaatctattcaacacgtcctgatgttaagtgtgtgatacacatccatacccttgcaacagcagctgtatcctccatgaaatgtgggatccttccaatttctcaagagtctcttcttctgggagatgttgcctattatgactaccaagggtcacttgaagaacaggaggagagaattcaactgcagaaggttctgggaccaagttgtaaggtgctggtactcaggaatcatggtgtggttgcacttggagaaacattagaggaggcttttcattatatttttaatgtgcaactagcctgtgagattcaggtgcaggccctagcaggtgcaggtggagtagacaatctccatgtactggactttcagaagtataaagctttcacttacactgtagcagcgtctggtggaggaggtgtgaatatgggttcccatcaaaaatggaaggttggcgaaattgagtttgaagggcttatgaggactctggacaacttggggtatagaacaggctatgcttacaggcatcctctcattcgagagaagcctaggcacaagagtgatgtggaaatcccagcaactgtgactgctttttcctttgaagacgatacagtgccactctctcctctcaaatacatggcacagaggcaacagcgtgaaaaaacaagatggctgaactcaccaaatacttacatgaaagtgaatgtgcctgaggagtctcggaacggagaaaccagtccccgaaccaaaatcacgtggatgaaagcagaagactcatctaaagttagtggtggaacacctatcaaaattgaagatccaaatcagtttgttcctttaaacacaaacccgaatgaggtactagaaaagagaaataagattcgggaacaaaatcgatatgacttgaaaacagcaggaccacaatctcagttgcttgctggaattgttgtggataagccaccttctactatgcaatttgaagatgatgatcatggcccaccagctcctcctaacccatttagtcatctcacagaaggagaacttgaagagtataagaggacaatcgaacgtaaacaacaaggcctagaagatgctgagcaggaattactctcagatgacgcttcatctgtttcacaaattcagtctcaaactcagtcaccgcaaaatgtccctgaaaaattagaagaaaaccatgagctgttttccaagagcttcatctccatggaagtgcctgtcatggtagtaaatggcaaggatgatatgcatgatgttgaagatgagcttgctaagcgagtgagtaggttaagcacaagtacaaccatagaaaacatcgagattactattaagtctccagagaaaatcgaagaagtcctgtcacctgaaggctccccttcaaaatcgccatccaagaaaaagaagaaattccgcactccttcttttctgaaaaagaacaaaaaaaaggagaaagttgaggcctaaataaagtctttttataattattattataacaatgtgacattgcacatctaaataccacatttaagttgatcattaatatgcaatggtagatcagattgggggatgtagcaaactggactttaagaactggaaagaggttttacaaaagaaaaactttcagattcatctctcattttatatgtccagaaatggctttgaattttaagcaattactagttttaattagctctgccctcatgaagtattattataattcaccataaacagctatctgtctgaattacttcaggccttctccataatatctgttagaaagaaattgccagtgagcaagtgagaatttttatttctcaatacctgcttcacttgataatcatattataattttttatcatgattattgactatatttttggagtcccattgtttcagtgggcattaacagaatgctttaaaaacttctaagacaagaatctatagcattagtatacactggcacataattttttaaaaagttttaagaaaagattcatttggaattttattcacagtataaaatttcctcacctgaagtaactttgtttgccaaaaaagttgttttaataaactataatttttgaaaacttccttttttattagtttagaaagccccttatttttcaacaaaggggattttgtacacataacatgggttatttagtttaactctggcaaaaaaaaaaaaaaaaattttgtatgttgatgtttgtataccgttcagtataaaagtgtcctaagcatattagccaatcttttcacagtagagcatacttaaggctgcttggtactgagtatacttaaatataactccagaatccagggacttggtgttaaaacaggattagagcatgtaaaggtacatctagattcatatttgaatcttaaactgtatttttctcttagtattgctaatgagtaaagaaaagtctcataaggtagccaaatgaaaaagaatgaaagggaaagtgaaaaattaaggggacaaaagatgggatgtgaaaagaagaattctagtttgatggtgactcatattcacgataggatacaaagtgtgatttgttggaaacatgtcccaaatttctaaaattctgcttctctgccaaaagcaatgtctttcttggttgatatttgagttttaaaagggtcaaatctttctaattttttgtatctttagagggcagcactagaagaaatcagcaggtctaatcccaccagtaagaaaactaccacttcttgatttttacagatttaaaaaaatcttttcagtgacctttctttttaatgtaaatacaaatttaaacctaggcttaatataggcgtttcccctttcacccaagtgatgtcacagttcgatgcaaaatcaatgatccagaatgatcgtgggtaaaaataactcaaagtgtttcttaagggtgagttggcatgcaaaaaattacattgattacagtgtgttttggagctggctctgtttgtgtgcatatgataatgcagagttgagccagagcctggaaatgtcattctagatctcactaactactggaatcagtgttttaatctcttggtggaaactttcagttgcttaactctctattggaagatttttttaatgttctacatcatttatgttgtattacaatgtatgtagaaatagtaacctgtgaactatgcttttccataactttttaaaaatatatatatctaaatgaatgcaatgtgcataaatattttttaaacataacagtgaactattgcaccttttgctaatgcctctatttacttgctttggcataaagaatgagccaatgaacctctgtgtcctgtggaaaaatgtataaatgttatctgatattgctcttagatgtaatgctaattaatgttaaatcacaaataaacagtattttaaatataaaaaaaaaaa

SEQ ID NO: 142 - protein, 706 aa, homo sapiens
MSSDASQGVITTPPPPSMPHKERYFDRINENDPEYIRERNMSPDLRQDFNMMEQRKRVTQILQSPAFREDLECLIQEQMKKGHNPTGLLALQQIADYIMANSFSGFSSPPLSLGMVTPINDLPGADTSSYVKGEKLTRCKLASLYRLVDLFGWAHLANTYISVRISKEQDHIIIIPRGLSFSEATASNLVKVNIIGEVVDQGSTNLKIDHTGFSPHAAIYSTRPDVKCVIHIHTLATAAVSSMKCGILPISQESLLLGDVAYYDYQGSLEEQEERIQLQKVLGPSCKVLVLRNHGVVALGETLEEAFHYIFNVQLACEIQVQALAGAGGVDNLHVLDFQKYKAFTYTVAASGGGGVNMGSHQKWKVGEIEFEGLMRTLDNLGYRTGYAYRHPLIREKPRHKSDVEIPATVTAFSFEDDTVPLSPLKYMAQRQQREKTRWLNSPNTYMKVNVPEESRNGETSPRTKITWMKAEDSSKVSGGTPIKIEDPNQFVPLNTNPNEVLEKRNKIREQNRYDLKTAGPQSQLLAGIVVDKPPSTMQFEDDDHGPPAPPNPFSHLTEGELEEYKRTIERKQQGLEDAEQELLSDDASSVSQIQSQTQSPQNVPEKLEENHELFSKSFISMEVPVMVVNGKDDMHDVEDELAKRVSRLSTSTTIENIEITIKSPEKIEEVLSPEGSPSKSPSKKKKKFRTPSFLKKNKKKEKVEA

SEQ ID NO: 143 - DNA, 5205 bp, homo sapiens
gagccgccgccgggtcccgctcgtctgccgcctcagcctcagccccaacctcagccgccgccgttgcgcttgctcccgggcggtcctggcctgtgccgccgccgcccccagcgtcggagccatggcgggcgccgcgtccccttgcgccaacggctgcgggcccggcgcgccctcggacgccgaggtgctgcacctctgccgcagcctcgaggtgggcaccgtcatgactttgttctactccaagaagtcgcagcgacccgagcggaagaccttccaggtcaagctggagacgcgccagatcacgtggagccggggcgccgacaagatcgagggggccattgacattcgtgaaattaaggagatccgcccagggaagacctcacgggactttgatcgctatcaagaggacccagctttccggccggaccagtcacattgctttgtcattctctatggaatggaatttcgcctgaaaacgctgagcctgcaagccacatctgaggatgaagtgaacatgtggatcaagggcttaacttggctgatggaggatacattgcaggcacccacacccctgcagattgagaggtggctccggaagcagttttactcagtggatcggaatcgtgaggatcgtatatcagccaaggacctgaagaacatgctgtcccaggtcaactaccgggtccccaacatgcgcttcctccgagagcggctgacggacctggagcagcgcagcggggacatcacctacgggcagtttgctcagctgtaccgcagcctcatgtacagcgcccagaagacgatggacctccccttcttggaagccagtactctgagggctggggagcggccggagctttgccgagtgtcccttcctgagttccagcagttccttcttgactaccagggggagctgtgggctgttgatcgcctccaggtgcaggagttcatgctcagcttcctccgagaccccttacgagagatcgaggagccatacttcttcctggatgagtttgtcaccttcctgttctccaaagagaacagtgtgtggaactcgcagctggatgcagtatgcccggacaccatgaacaaccctctttcccactactggatctcctcctcgcacaacacgtacctgaccggggaccagttctccagtgagtcctccttggaagcctatgctcgctgcctgcggatgggctgtcgctgcattgagttggactgctgggacggcccggatgggatgccagttatttaccatgggcacacccttaccaccaagatcaagttctcagatgtcctgcacaccatcaaggagcatgcctttgtggcctcagagtacccagtcatcctgtccattgaggaccactgcagcattgcccagcagagaaacatggcccaatacttcaagaaggtgctgggggacacactcctcaccaagcccgtggagatctctgccgacgggctcccctcacccaaccagcttaagaggaagatcctcatcaagcacaagaagctggctgagggcagtgcctacgaggaggtgcctacatccatgatgtactctgagaacgacatcagcaactctatcaagaatggcatcctctacctggaggaccctgtgaaccacgaatggtatccccactactttgttctgaccagcagcaagatctactactctgaggagaccagcagtgaccagggcaacgaggatgaggaggagcccaaggaggtcagcagcagcacagagctgcactccaatgagaagtggttccatgggaagctaggggcagggcgtgacgggcgtcacatcgctgagcgcctgcttactgagtactgcatcgagaccggagcccctgacggctccttcctcgtgcgagagagtgagaccttcgtgggcgactacacgctctctttctggcggaacgggaaagtccagcactgccgtatccactcccggcaagatgctgggacccccaagttcttcttgacagacaacctcgtctttgactccctctatgacctcatcacgcactaccagcaggtgcccctgcgctgtaatgagtttgagatgcgactttcagagcctgtcccacagaccaacgcccacgagagcaaagagtggtaccacgcgagcctgaccagagcacaggctgagcacatgctaatgcgcgtccctcgtgatggggccttcctggtgcggaagcggaatgaacccaactcatatgccatctctttccgggctgagggcaagatcaagcattgccgtgtccagcaagagggccagacagtgatgctagggaactcggagttcgacagccttgttgacctcatcagctactatgagaaacacccgctataccgcaagatgaagctgcgctatcccatcaacgaggaggcactggagaagattggcacagctgagcctgactacggggccctgtatgagggacgcaaccctggcttctatgtagaggcaaaccctatgccaactttcaagtgtgcagtcaaagccctctttgactacaaggcccagagggaggacgagctgaccttcatcaagagcgccatcatccagaatgtggagaagcaagagggaggctggtggcgaggggactacggagggaagaagcagctgtggttcccatcaaactacgtggaagagatggtcaaccccgtggccctggagccggagagggagcacttggacgagaacagccccctaggggacttgctgcggggggtcttggatgtgccggcttgtcagattgccatccgtcctgagggcaagaacaaccggctcttcgtcttctccatcagcatggcgtcggtggcccactggtccctggatgttgctgccgactcacaggaggagctgcaggactgggtgaaaaagatccgtgaagtggcccagacagcagacgccaggctcactgaagggaagataatggaacggaggaagaagattgccctggagctctctgaacttgtcgtctactgccggcctgttccctttgatgaagagaagattggcacagaacgtgcttgctaccgggacatgtcatccttcccggaaaccaaggctgagaaatacgtgaacaaggccaaaggcaagaagttccttcagtacaatcgactgcagctctcccgcatctaccccaagggccagcgactggattcctccaactacgatcctttgcccatgtggatctgtggcagtcagcttgtggccctcaacttccagacccctgacaagcctatgcagatgaaccaggccctcttcatgacgggcaggcactgtggctacgtgctgcagccaagcaccatgcgggatgaggccttcgacccctttgacaagagcagcctccgcgggctggagccatgtgccatctctattgaggtgctgggggcccgacatctgccaaagaatggccgaggcattgtgtgtccttttgtggagattgaggtggctggagctgagtatgacagcaccaagcagaagacagagtttgtggtggacaatggactcaaccctgtatggccagccaagcccttccacttccagatcagtaaccctgaatttgcctttctgcgcttcgtggtgtatgaggaagacatgtttagtgaccagaatttcctggctcaggctactttcccagtaaaaggcctgaagacaggatacagagcagtgcctttgaagaacaactacagtgaggacctggagttggcctccctgctgatcaagattgacattttccctgccaagcaggagaatggtgacctcagtcccttcagtggtacgtccctgcgggagcggggctcagatgcctcaggccagctgtttcatggccgagcccgggaaggctcctttgaatcccgctaccagcagccgtttgaggacttccgcatctcccaggagcatctcgcagaccattttgacagtcgagaacgaagggccccaagaaggactcgggtcaatggagacaaccgcctctagttgtaccccagcctcgttggagagcagcaggtgctgtgcgccttgtagaatgccgcgaactgggttctttggaagcagccccctgtggcggccttccgggtctcgcagcctgaagcctggattccagcagtgaatgctagacagaaaccaagccattaatgagatgttattactgttttgggcctccatgccccagctctggatgaaggcaaaaactgtactgtgtttcgcattaagcacacacatctggccctgacttctggagatggatccttccatcttgtggggccaggaccatggccgaagccccttggagagagaggctgcctcagccagtggcacaggagactccaaggagctactgacattcctaagagtggaggaggaggaggagccttgctgggccagggaaacaaagtttacattgtcctgtagctttaaaaccacagctgggcagggtgagaagctagatgcccctgcagtttggccctggagccagggcagaggaatgtagggcctgcatggagaagggttctgccctgcctgaggaggaggacacagcacaagggcacattgcccatggctgggaacatgacccagcctgaaagatacaggggatcatgttaaaaatagcagtattatttttcgtctcaatggtattgtaactaagttatttactcctcctgctcctcacccctgtagggaaaccttggagaggagagtggcaggtgggctgcctgctgtgttaagaggacttagtttgtgatgtaaggcactgtcaggaatggggggcgggccagggtgggaagagaagaaatagcagagcctattttggtgaggttttttgtttttaagtcaaagaagactcagtatgctttccctgaggaatgaaaaagggattgaggagttgcctgactcctgggtgggtggggtacaggcagttaggtgctgaatgaagctgccatccttgctgcagcttctaactggtaaaaagatccagggatggagatgggaaggttagaaaggcagccctcacctctgaggacagaggccggggtccaggcccgtgggcgcaaaggtgcctcatagcatagccagcattcagcacacacaaacctactgcccacatttgggctcagggttggccatttgctagttctgctgccctcttaagatctgactgccaaataaatcatcctcatgtcctt

SEQ ID NO: 144 - protein, 1291 aa, homo sapiens
MAGAASPCANGCGPGAPSDAEVLHLCRSLEVGTVMTLFYSKKSQRPERKTFQVKLETRQITWSRGADKIEGAIDIREIKEIRPGKTSRDFDRYQEDPAFRPDQSHCFVILYGMEFRLKTLSLQATSEDEVNMWIKGLTWLMEDTLQAPTPLQIERWLRKQFYSVDRNREDRISAKDLKNMLSQVNYRVPNMRFLRERLTDLEQRSGDITYGQFAQLYRSLMYSAQKTMDLPFLEASTLRAGERPELCRVSLPEFQQFLLDYQGELWAVDRLQVQEFMLSFLRDPLREIEEPYFFLDEFVTFLFSKENSVWNSQLDAVCPDTMNNPLSHYWISSSHNTYLTGDQFSSESSLEAYARCLRMGCRCIELDCWDGPDGMPVIYHGHTLTTKIKFSDVLHTIKEHAFVASEYPVILSIEDHCSIAQQRNMAQYFKKVLGDTLLTKPVEISADGLPSPNQLKRKILIKHKKLAEGSAYEEVPTSMMYSENDISNSIKNGILYLEDPVNHEWYPHYFVLTSSKIYYSEETSSDQGNEDEEEPKEVSSSTELHSNEKWFHGKLGAGRDGRHIAERLLTEYCIETGAPDGSFLVRESETFVGDYTLSFWRNGKVQHCRIHSRQDAGTPKFFLTDNLVFDSLYDLITHYQQVPLRCNEFEMRLSEPVPQTNAHESKEWYHASLTRAQAEHMLMRVPRDGAFLVRKRNEPNSYAISFRAEGKIKHCRVQQEGQTVMLGNSEFDSLVDLISYYEKHPLYRKMKLRYPINEEALEKIGTAEPDYGALYEGRNPGFYVEANPMPTFKCAVKALFDYKAQREDELTFIKSAIIQNVEKQEGGWWRGDYGGKKQLWFPSNYVEEMVNPVALEPEREHLDENSPLGDLLRGVLDVPACQIAIRPEGKNNRLFVFSISMASVAHWSLDVAADSQEELQDWVKKIREVAQTADARLTEGKIMERRKKIALELSELVVYCRPVPFDEEKIGTERACYRDMSSFPETKAEKYVNKAKGKKFLQYNRLQLSRIYPKGQRLDSSNYDPLPMWICGSQLVALNFQTPDKPMQMNQALFMTGRHCGYVLQPSTMRDEAFDPFDKSSLRGLEPCAISIEVLGARHLPKNGRGIVCPFVEIEVAGAEYDSTKQKTEFVVDNGLNPVWPAKPFHFQISNPEFAFLRFVVYEEDMFSDQNFLAQATFPVKGLKTGYRAVPLKNNYSEDLELASLLIKIDIFPAKQENGDLSPFSGTSLRERGSDASGQLFHGRAREGSFESRYQQPFEDFRISQEHLADHFDSRERRAPRRTRVNGDNRL

SEQ ID NO: 145 - RNA, 61 nt, homo sapiens
gggcaggagagaaccaagccgaagaaagggagacaaaaacagccaaaggaacacgaggccc

SEQ ID NO: 146 - DNA, 2083 bp, homo sapiens
ctccctgctccaccccgtgcctagggcagcacaaaagccaatcgctagcaaactccctgcctagcaaggcccagcctggggcagaaatggctgcaagtggccgaggtctctgcaaggctgtggccgcctctcccttcccggcgtggagacgagataacacggaagccaggggaggtctgaagcctgagtatgatgcggtggtgataggagcaggacacaacggactggtggctgcagcgtacctgcagagactgggggtgaacaccgccgtcttcgagaggcgccatgtgatcgggggtgcagctgtcactgaggagatcatcccagggtttaagttctcccgcgcgtcctacctgctcagcctgctgaggccgcagatttacactgatctggagctgaagaaacatgggctgaggcttcatcttcgaaacccctactccttcacccccatgctggaagagggtgcaggcagcaaggtgcccaggtgccttctgctgggcacagacatggcagaaaaccagaagcagatcgcccagttctcccagaaggatgcccaggtctttcccaaatatgaggagttcatgcatcgcttggcattagccattgaccctctgctggatgcggcccccgtggacatggcggccttccagcatggctccttgctgcaaaggatgaggtcgctctccaccctcaagcccctgctgaaggcaggccgcatcctgggagcccagcttccccgatattatgaggtcctcacagctcccattaccaaggtgctggatcagtggttcgagtctgagcctttaaaagccactctagccacagatgcagtgattggagccatgacaagtccccacactccggggagtgggtatgtgctgctgcaccatgtgatggggggcctggagggaatgcagggggcctggggctacgtccaggggggcatgggtgccctctctgatgcgatcgcaagctcagccaccacacatggagcaagcatcttcactgaaaagacagtggcgaaggtgcaggtgaacagtgaaggctgtgttcaaggagttgtgctggaagatggcacagaggtgagaagcaaaatggtgctgtccaacacatcaccgcagatcaccttcctgaagctgacgccacaggagtggcttcctgaggagttcctggagagaatctctcagctggacacccggtcgcctgtcaccaagatcaatgtggccgtagacaggctgcccagcttcctggcggcccccaatgctcccaggggccagccgctgccccatcaccaatgctccatccacctgaactgtgaagacaccctcctccttcatcaggcctttgaagatgccatggatggcctgccttcccacaggcctgtgattgagctctgcatcccttcctcgctggaccccaccctggctccccctggctgccatgtagtctccctcttcactcagtacatgccctatacgctggctggaggcaaggcctgggacgagcaggagagagacgcttatgcagacagagtgtttgattgcatcgaggtctatgcccctggcttcaaggactctgtggttggcagagacatcctcacaccaccagatttggagagaatcttcgggcttcctggagggaacatattccactgcgccatgtccctggaccagctctacttcgcccgccccgtgcccctgcattctggctaccgctgccctctccagggcctgtatctctgtggaagtggggctcatcctggaggaggtgtgatgggagctgctgggcgaaatgcagcacatgtggcctttagggacctcaagagcatgtgaccctgaaccagctctgacccaggaagaagactccacccctgaattccaagtgctccattggatcagcttcccaggaagttcagcttcgggttagtacataaggccaccacaatgctcaagaaattattttagaaaaaacgtacgagttacatttagtgcaagttgaccttatgcccatgcctccatacatggactggttctgttttattaaaactaatatttcatacagattaaaaaaaaaaaaaaaaaaa

SEQ ID NO: 147 - protein, 581 aa, homo sapiens
MAASGRGLCKAVAASPFPAWRRDNTEARGGLKPEYDAVVIGAGHNGLVAAAYLQRLGVNTAVFERRHVIGGAAVTEEIIPGFKFSRASYLLSLLRPQIYTDLELKKHGLRLHLRNPYSFTPMLEEGAGSKVPRCLLLGTDMAENQKQIAQFSQKDAQVFPKYEEFMHRLALAIDPLLDAAPVDMAAFQHGSLLQRMRSLSTLKPLLKAGRILGAQLPRYYEVLTAPITKVLDQWFESEPLKATLATDAVIGAMTSPHTPGSGYVLLHHVMGGLEGMQGAWGYVQGGMGALSDAIASSATTHGASIFTEKTVAKVQVNSEGCVQGVVLEDGTEVRSKMVLSNTSPQITFLKLTPQEWLPEEFLERISQLDTRSPVTKINVAVDRLPSFLAAPNAPRGQPLPHHQCSIHLNCEDTLLLHQAFEDAMDGLPSHRPVIELCIPSSLDPTLAPPGCHVVSLFTQYMPYTLAGGKAWDEQERDAYADRVFDCIEVYAPGFKDSVVGRDILTPPDLERIFGLPGGNIFHCAMSLDQLYFARPVPLHSGYRCPLQGLYLCGSGAHPGGGVMGAAGRNAAHVAFRDLKSM

SEQ ID NO: 148 - DNA, 1957 bp, homo sapiens
ctgtttgcatctctgcaaccacttcagaaggcacgtgtttggtttgctctgagcctaacctagagtgctcgcagcagtctttcagttgagcttggggactgcagctgtggggagatttcagtgcattgcctcccctgggtgctcttcatcttggatttgaaagttgagagcagcatgttttgcccactgaaactcatcctgctgccagtgttactggattattccttgggcctgaatgacttgaatgtttccccgcctgagctaacagtccatgtgggtgattcagctctgatgggatgtgttttccagagcacagaagacaaatgtatattcaagatagactggactctgtcaccaggagagcacgccaaggacgaatatgtgctatactattactccaatctcagtgtgcctattgggcgcttccagaaccgcgtacacttgatgggggacatcttatgcaatgatggctctctcctgctccaagatgtgcaagaggctgaccagggaacctatatctgtgaaatccgcctcaaaggggagagccaggtgttcaagaaggcggtggtactgcatgtgcttccagaggagcccaaagagctcatggtccatgtgggtggattgattcagatgggatgtgttttccagagcacagaagtgaaacacgtgaccaaggtagaatggatattttcaggacggcgcgcaaaggaggagattgtatttcgttactaccacaaactcaggatgtctgtggagtactcccagagctggggccacttccagaatcgtgtgaacctggtgggggacattttccgcaatgacggttccatcatgcttcaaggagtgagggagtcagatggaggaaactacacctgcagtatccacctagggaacctggtgttcaagaaaaccattgtgctgcatgtcagcccggaagagcctcgaacactggtgaccccggcagccctgaggcctctggtcttgggtggtaatcagttggtgatcattgtgggaattgtctgtgccacaatcctgctgctccctgttctgatattgatcgtgaagaagacctgtggaaataagagttcagtgaattctacagtcttggtgaagaacacgaagaagactaatccagagataaaagaaaaaccctgccattttgaaagatgtgaaggggagaaacacatttactccccaataattgtacgggaggtgatcgaggaagaagaaccaagtgaaaaatcagaggccacctacatgaccatgcacccagtttggccttctctgaggtcagatcggaacaactcacttgaaaaaaagtcaggtgggggaatgccaaaaacacagcaagccttttgagaagaatggagagtcccttcatctcagcagcggtggagactctctcctgtgtgtgtcctgggccactctaccagtgatttcagactcccgctctcccagctgtcctcctgtctcattgtttggtcaatacactgaagatggagaatttggagcctggcagagagactggacagctctggaggaacaggcctgctgaggggaggggagcatggacttggcctctggagtgggacactggccctgggaaccaggctgagctgagtggcctcaaaccccccgttggatcagaccctcctgtgggcagggttcttagtggatgagttactgggaagaatcagagataaaaaccaacccaaatcattcctctggcacattatttctaaataagtgttgtttgtggaaatcgtcctatttttatgcctcggttgagggggcaagtaaagtcctggtgaggaatttacagttagaaacttttggaaaaactgaagttcctggaggaaagccaaaccgtgctaacacactagaggctggttttggtcctgggaaaggtttggggtgaatgggttggaagtagggtatgaatacagttttgggattt

SEQ ID NO: 149 - protein, 394 aa, homo sapiens
MFCPLKLILLPVLLDYSLGLNDLNVSPPELTVHVGDSALMGCVFQSTEDKCIFKIDWTLSPGEHAKDEYVLYYYSNLSVPIGRFQNRVHLMGDILCNDGSLLLQDVQEADQGTYICEIRLKGESQVFKKAVVLHVLPEEPKELMVHVGGLIQMGCVFQSTEVKHVTKVEWIFSGRRAKEEIVFRYYHKLRMSVEYSQSWGHFQNRVNLVGDIFRNDGSIMLQGVRESDGGNYTCSIHLGNLVFKKTIVLHVSPEEPRTLVTPAALRPLVLGGNQLVIIVGIVCATILLLPVLILIVKKTCGNKSSVNSTVLVKNTKKTNPEIKEKPCHFERCEGEKHIYSPIIVREVIEEEEPSEKSEATYMTMHPVWPSLRSDRNNSLEKKSGGGMPKTQQAF

SEQ ID NO: 150 - DNA, 2805 bp, homo sapiens
ctccttgcacgggccggcccagcttccccgcccctggcgtccgctccctcccgctcgcagcttacttaacctggcccgggcggcggaggcgctctcacttccctggagccgcccgcttgcccgtcggtcgctagctcgctcggtgcgcgtcgtcccgctccatggcgctcttcgtgcggctgctggctctcgccctggctctggccctgggccccgccgcgaccctggcgggtcccgccaagtcgccctaccagctggtgctgcagcacagcaggctccggggccgccagcacggccccaacgtgtgtgctgtgcagaaggttattggcactaataggaagtacttcaccaactgcaagcagtggtaccaaaggaaaatctgtggcaaatcaacagtcatcagctacgagtgctgtcctggatatgaaaaggtccctggggagaagggctgtccagcagccctaccactctcaaacctttacgagaccctgggagtcgttggatccaccaccactcagctgtacacggaccgcacggagaagctgaggcctgagatggaggggcccggcagcttcaccatcttcgcccctagcaacgaggcctgggcctccttgccagctgaagtgctggactccctggtcagcaatgtcaacattgagctgctcaatgccctccgctaccatatggtgggcaggcgagtcctgactgatgagctgaaacacggcatgaccctcacctctatgtaccagaattccaacatccagatccaccactatcctaatgggattgtaactgtgaactgtgcccggctgctgaaagccgaccaccatgcaaccaacggggtggtgcacctcatcgataaggtcatctccaccatcaccaacaacatccagcagatcattgagatcgaggacacctttgagacccttcgggctgctgtggctgcatcagggctcaacacgatgcttgaaggtaacggccagtacacgcttttggccccgaccaatgaggccttcgagaagatccctagtgagactttgaaccgtatcctgggcgacccagaagccctgagagacctgctgaacaaccacatcttgaagtcagctatgtgtgctgaagccatcgttgcggggctgtctgtagagaccctggagggcacgacactggaggtgggctgcagcggggacatgctcactatcaacgggaaggcgatcatctccaataaagacatcctagccaccaacggggtgatccactacattgatgagctactcatcccagactcagccaagacactatttgaattggctgcagagtctgatgtgtccacagccattgaccttttcagacaagccggcctcggcaatcatctctctggaagtgagcggttgaccctcctggctcccctgaattctgtattcaaagatggaacccctccaattgatgcccatacaaggaatttgcttcggaaccacataattaaagaccagctggcctctaagtatctgtaccatggacagaccctggaaactctgggcggcaaaaaactgagagtttttgtttatcgtaatagcctctgcattgagaacagctgcatcgcggcccacgacaagagggggaggtacgggaccctgttcacgatggaccgggtgctgacccccccaatggggactgtcatggatgtcctgaagggagacaatcgctttagcatgctggtagctgccatccagtctgcaggactgacggagaccctcaaccgggaaggagtctacacagtctttgctcccacaaatgaagccttccgagccctgccaccaagagaacggagcagactcttgggagatgccaaggaacttgccaacatcctgaaataccacattggtgatgaaatcctggttagcggaggcatcggggccctggtgcggctaaagtctctccaaggtgacaagctggaagtcagcttgaaaaacaatgtggtgagtgtcaacaaggagcctgttgccgagcctgacatcatggccacaaatggcgtggtccatgtcatcaccaatgttctgcagcctccagccaacagacctcaggaaagaggggatgaacttgcagactctgcgcttgagatcttcaaacaagcatcagcgttttccagggcttcccagaggtctgtgcgactagcccctgtctatcaaaagttattagagaggatgaagcattagcttgaagcactacaggaggaatgcaccacggcagctctccgccaatttctctcagatttccacagagactgtttgaatgttttcaaaaccaagtatcacactttaatgtacatgggccgcaccataatgagatgtgagccttgtgcatgtgggggaggagggagagagatgtactttttaaatcatgttccccctaaacatggctgttaacccactgcatgcagaaacttggatgtcactgcctgacattcacttccagagaggacctatcccaaatgtggaattgactgcctatgccaagtccctggaaaaggagcttcagtattgtggggctcataaaacatgaatcaagcaatccagcctcatgggaagtcctggcacagtttttgtaaagcccttgcacagctggagaaatggcatcattataagctatgagttgaaatgttctgtcaaatgtgtctcacatctacacgtggcttggaggcttttatggggccctgtccaggtagaaaagaaatggtatgtagagcttagatttccctattgtgacagagccatggtgtgtttgtaataataaaaccaaagaaacata

SEQ ID NO: 151 - protein, 683 aa, homo sapiens
MALFVRLLALALALALGPAATLAGPAKSPYQLVLQHSRLRGRQHGPNVCAVQKVIGTNRKYFTNCKQWYQRKICGKSTVISYECCPGYEKVPGEKGCPAALPLSNLYETLGVVGSTTTQLYTDRTEKLRPEMEGPGSFTIFAPSNEAWASLPAEVLDSLVSNVNIELLNALRYHMVGRRVLTDELKHGMTLTSMYQNSNIQIHHYPNGIVTVNCARLLKADHHATNGVVHLIDKVISTITNNIQQIIEIEDTFETLRAAVAASGLNTMLEGNGQYTLLAPTNEAFEKIPSETLNRILGDPEALRDLLNNHILKSAMCAEAIVAGLSVETLEGTTLEVGCSGDMLTINGKAIISNKDILATNGVIHYIDELLIPDSAKTLFELAAESDVSTAIDLFRQAGLGNHLSGSERLTLLAPLNSVFKDGTPPIDAHTRNLLRNHIIKDQLASKYLYHGQTLETLGGKKLRVFVYRNSLCIENSCIAAHDKRGRYGTLFTMDRVLTPPMGTVMDVLKGDNRFSMLVAAIQSAGLTETLNREGVYTVFAPTNEAFRALPPRERSRLLGDAKELANILKYHIGDEILVSGGIGALVRLKSLQGDKLEVSLKNNVVSVNKEPVAEPDIMATNGVVHVITNVLQPPANRPQERGDELADSALEIFKQASAFSRASQRSVRLAPVYQKLLERMKH

SEQ ID NO: 152 - DNA, 6489 bp, homo sapiens
gcgcgtgcgcgcgcccggccggccgtcgccgcggtgaccgtcctcggagtccgtcggctcgcgccccgcccccgtcgccccctcccctgtcgcgcgctggggctgtttctcgctccttccgagttaccgccgccgtcgccgccgctcctcctctcccggtcctgggtttccttggcgctgcggccgccgctccctctgcgacctgtatgaggaggaggaggaggaggatgtgaagatggcggagctgcagatgctgctggaagaggaaatcccggggggccgccgggccctcttcgacagctacacaaatctggaacgggtggccgattactgcgagaacaactacatacagtcagcagataagcagagagccctagaagaaaccaaagcctacaccacccaatccttagcaagtgttgcctatctgataaacaccttggccaacaatgtcctgcagatgctggatatccaggcatcccagctacgaaggatggaatcttcaatcaatcatatttcacaaacagttgatattcataaagagaaagttgcaagaagagaaattggtattttgactaccaataaaaacacttcaaggacacataagattattgctccagccaaccttgaacgaccagttcgttatattagaaaacctattgactatacaattctagatgatattggacatggagtaaaggtgagtacccagaacatgaagatgggtgggctgccgcgtacaacacctccaactcagaagccccctagtccccctatgtcagggaaagggacacttgggcggcactccccctatcgcacactggagccagtgcgtcctccagtggtaccaaatgattacgtacctagcccaacccgtaatatggctccctcgcagcagagccctgtgaggacagcttctgtgaatcaaagaaatcgaacttacagcagcagtgggagtagtggagggagccacccaagtagtcggagcagcagtcgagagaacagtggaagtggtagtgtgggggttcctattgctgttcctactccatctcctcccagtgtctttccaggtcatcctgtacagttctacagcatgaataggcctgcctctcgccatactcccccaacaatagggggctcgttgccctatagacgccctccttccattacttcacaaacaagccttcagaatcagatgaatggaggacctttttatagccagaatccagtatctcttgctcctcctcctccctccatcctacaggtaactcctcagttacctttaatgggatttgtggccagagtccaagaaaatatttcagatacaccacctccaccgccacctgtggaagaaccagtctttgatgagtctcccccacctcctcctcctccagaagattacgaagaggaggaagctgctgtggttgagtatagtgatccttatgctgaagaggacccaccgtgggctccacgttcttacttggaaaaggttgtggcaatttatgactatacaaaagacaaggaagatgagctgtcctttcaggaaggagccattatttatgtcatcaagaagaatgacgatggttggtatgagggagttatgaatggagtgactgggctttttcctgggaattacgttgagtctatcatgcattattctgagtaaagctcagcagggctgtgcttgcctcacaggaatagtcaggtcttcccagattatctgaaggccctggggattccactccagtaaagtagaatgaaggatacaaatgataaaaattacacttttttttttggtttattccccagtattaaaaacaaagcaagctgagtctgaacaaatggatctttctgccatcatttgtacaatgctgagctgtctggattgaaataaaatgaccatttttatgtatgtcaaaggtataacagcataactgtgtagccaaaacaaaatcagattaagactgattcagaaaaatctgggatctttctcaggaatactgtatacccttgggatttctcctcctgcagaatctgtggcattggatgttcttcattgcctgtgctaaggggttaacctcatggcccagtgggtaccctagccccttcttttcttccacttgtatgaagaggagggaaccaacatttaaataccacacttaaccatttttacaattatttcagatggcttttttcctctgtgacactgtaaattctgcattctctcagcacttgagtgcaccaaacgagtgaatgctgaactcacttgcatcccttcatgtttctgtttgtggattataaggatgatgaaatgtgaaagtctcccaacactctgagggtggtgaacgattgccacccgtttgattttaatgtgctgctgcatgagactgcattgttgctaatggccagtgtacccagatgtgaagtgtggtaggctggttcatatgtggaggtgggtgtgtgaagctagacacgaaggtccctaaggttctgaagagacttgaactgtggaaatgctcttagcaggcatcccgaacccctgcttcggtgctgttttgaggagtaggatcttggagttcagaccaactatgactatcatttccttcactatctagaaaaacgctattctactttggaagagaatagtagttattttcaagtctcctgacagtcactgggagtacaaggtttgctaatgtgctctctggacgttattaatggccagtattagttgctgctgtattactgactcgcttagctgtagaaagggtaatactctcctgattttgtatgattggactcttaagtagctgctgttagtcagaattaaaacccatctcagactaagaatataatgaataagattaataggccaaaatatgtatctaatcacattgataaaaattaatataactgacacaataaaacacatttcccccatctgtacaataaatacagcttcaaattcagtggagtctgtagggcagataactttaatcatcactactgtagtcagtataagaaatgctgaaaaaaatccaggagggcttgtctctttgtgggtggtcactgtgatgttgggccagctcctgttcaggtccagagctgctaacgtgggttctactcagtcccagtgacttggccagaatagagctttgccaggtaactgccctgtgctaggtgaaaggggaaaagcagtagctggatatatttcaaatgaggttttgaacaagttcagaaagtggaacttgattgaaaagtgaacaagtgtagtagtgtgtgagaaaattcagatggtgtcggatgcagaagttaatattccacttaatgttatctgagcattaaaaatcatcagcatttaactgagaccccactatagagtttccttatcaagactttttggttttaaagttgtttttaatgcattgcaagttacaatagctattttgcttttagatttttcccagcactttgtatttattagctttcattaacttgcctccagtatacattccacttcgtgcttttcttaggtcatttctacatcccttattccttgttttcctgcagtgtaatggccctgaatgtcctctgagccttcagctccattatggacccaaactagactatacttggataagttaagctcttcttcgtgtactggtctataattagaaaaactgttttaaattagatgttcccattatttatttaaacagctttttgctgagaaagcttagtggattaatgaggcagagggtgttttgaaatccaataaatagttcccacaggctgggtgtggtggcttatgcctgtaatcccagcactttcggaggccgaggtgggtggatcatgaggtcaataaattgagaccatcctggccaacatggtgaaaccccatctctactaaaaacacaaaaattagctgggcgtggtggcgcacacctgtagtcccagctacttgggaggctgaggcaggagaatcactggaacctgggaggcagaggttgcagtgagccgagattgtgccactgcactccagcctggtgacagagcgagactccatcaaaaaaaaaaaaaaaaagttcccacagctcaccactacagaagcagggaagacaactatgcagaaaacagagttagtggcggtcagcaggaatgcagctggtcttttggacccctacgggatgggggcagtgcagaagacactggtgaagtcctttatactgaagacctgtggttgggagcaggggtagtccatgggtctgctgattttttttccctatttagtactaatgtgtgtgtgatctttgttttacaaacagtaccttttgggttttctgcatattttataatttttgtacagttttgaattctatagattgtcttggaaggatactgtgtgatgggtcaggcacacagtaattggagacttttaatgtatgtaatatttcatagattgcatgctattaatcatctgtgagggtagtattttttgttttattgtaagtttccctctttttttataaattaaaagatggttggtattaggaatttcaaatgaatgcagaaaatcttacatgctgtgtactattaatattataacagacgatccaagtccaaaatctgaccaataaagcaaccattttatcaagatagagggattctaatgggagaggggattcttccctcctgaagtttgtgtgtccagtccccttaaaaaaaatgaatagttgtcttttcttgtcatattaatactcgaaagtccatggtggtattaatgaaagtacactttattgttgcctttgaacttacggccaaggcaataaatcagaaacaaaaatagtgccaatgtgtcaaaatcgacatctgagagattcagcctcccatttggaataaatatgaatcttctaagctatcttgtttaatattttccatcatttagctacttcctatctccctcagaggcgcctgctgttcccattttagagttgacagtggcctgctaattttgctatgttcctaaaagttactgggtgtgagacattttcatcccctcctttttcctactgctggtgtttattatccagctagacaatattttatgcatatttaccgtgatgtctggaccgtacctgtgctccttggcagtttatgttgaagataactaaagatttttctctttgggaggcatcaaaatgatggtagtttgcttttatctttttatgttcattttcttttagtaggtgacctttctgcattaagaactgtttttatcttttactaccttttcttttctcctttgtggagacagcatgacatgtcctgaaggtcacctttgcctttgaaaaaggtttgatggaggaattcacaggtgactgacaagtctttgaaaagaatgggatctgctcacttctggtctttttggccgggaactcctgattggtgttaaggtggtaatttcccccatataagatttagaatcactgagtttgagctagatgaaatttttaaaatttctggttgtctcattagactgatgaggtgagttttcttcttcatatgaacagctagttaataacagcagagttctcactcagtgctcagtacttaattttccactgcaccacaactgtcttaactaaatgtgctgtatttttctttaaaagttaagagttctatttggtgttttcaggaatatacgtgaaaagacatgccatgttttggtaaataccatcagagttgtgtaaaggcgtgtactaagtgcaatcttaatttgtggaaataatcttcatttacccctcctaaaactacactcagtataaacactttcccataaggtgtgtgcagtaaaaatgttatattactccaacactggcaggagcacagcacagcagccttattggagagagccttataaaagtgattaaatggaggcattgagctcattacctttaagtttactttgtgctgacctttgttcctgttttgagaatctcatataattattaaaaaaaaaaaacaattaaaacgaaacggcggggcctagctgtgtataaatgatccttgctgaatatcttaaggttttttgtaagaaaaaagaaaaaccaacaaaaaaagcttattttcacattaaaatgaaacctcttttgcaacttaagaattctatggaaaagcagtttttatcatattttgtgtccatgcaccatttttcttaaaatggcttacaaaaaagaatgtaaacaatttgtgatctggccagttgtacttttagctcccagagggagagttggtggtattatgagttgagtaaaaaccatccaggggaacttgagggagcagtctgttgccagtaatgttccttgtgtgccattaaaccacctccagatgagtggaggaacatcactttttaattttttaattgtatttggaattgttgccgtgtactaagaacttgacctaaataaaatcccacaaagtataaaaaaaaaa

SEQ ID NO: 153 - protein, 475 aa, homo sapiens
MAELQMLLEEEIPGGRRALFDSYTNLERVADYCENNYIQSADKQRALEETKAYTTQSLASVAYLINTLANNVLQMLDIQASQLRRMESSINHISQTVDIHKEKVARREIGILTTNKNTSRTHKIIAPANLERPVRYIRKPIDYTILDDIGHGVKVSTQNMKMGGLPRTTPPTQKPPSPPMSGKGTLGRHSPYRTLEPVRPPVVPNDYVPSPTRNMAPSQQSPVRTASVNQRNRTYSSSGSSGGSHPSSRSSSRENSGSGSVGVPIAVPTPSPPSVFPGHPVQFYSMNRPASRHTPPTIGGSLPYRRPPSITSQTSLQNQMNGGPFYSQNPVSLAPPPPSILQVTPQLPLMGFVARVQENISDTPPPPPPVEEPVFDESPPPPPPPEDYEEEEAAVVEYSDPYAEEDPPWAPRSYLEKVVAIYDYTKDKEDELSFQEGAIIYVIKKNDDGWYEGVMNGVTGLFPGNYVESIMHYSE

SEQ ID NO: 154 - DNA, 3575 bp, homo sapiens
aggattctaaaaagagcaatggttcacaaggaaacttctgcctcaggtggggagaggagtccatagatcagggaaacttatgtcttggtgaaatggaagaccatgtttctaaacacctgtcgccaggttacttgaatttccactagaggagcagaaatgccaccaatgccaagtgccccacctgtgcatccacctccagatggaggatggggttggattgtggttggagcagcttttatctccattggattttcctatgcattccccaaagctgtcaccgtattcttcaaagaaattcagcaaatattccacactacctacagtgaaatagcatggatttcatccattatgctggctgttatgtacgcaggaggtcctgtaagtagtgttttggtgaataaatacggcagccggccggtggtgatagcaggaggcttattatgctgtcttggaatggtgttggcctcctttagtagcagcgtggtacagctgtacctcactatgggattcattacaggtttaggtttagccttcaacctgcaacccgccttaaccataattggcaaatacttctataggaagcgacccatggcaaatggattggccatggcaggaagtcctgttttcttaagttcattggctcctttcaatcagtacctttttaatacttttggctggaaaggaagcttcctgattttgggaagtctacttttgaatgcctgtgtggctggttccctcatgagaccccttggacccaatcaaaccacttctaagtctaaaaataagactggcaaaacagaagatgattcaagcccaaagaaaatcaaaacgaagaaatcaacttgggaaaaagttaataagtatttagatttctccctttttaagcatagaggatttctgatatatctgtctggaaatgtcattatgttcctaggtttttttgcccccattatattcttggctccatatgctaaagaccaaggaattgatgagtactcggcagcttttctgctatctgttatggctttcgttgatatgtttgctaggccttctgtaggattaattgcaaactccaaatatattcgacctcgaattcagtacttcttcagttttgcaatcatgttcaatggagtgtgtcacctcttgtgcccactggcacaggactacacaagcctggtattatatgctgtattttttggccttggatttgggagtgttagcagtgttctctttgaaactctcatggacctcgtgggtgcaccaagattttccagtgccgtcggacttgtcacaattgtggagtgtggcccagttcttcttggccctcctcttgcaggtaaattggtggatttaactggagaatataaatacatgtacatgtcctgtggggctattgtggtagcagcaagcgtgtggctgctcattggcaatgctatcaactatagattgcttgcaaaggaaaggaaggaggaaaatgcaaggcagaagaccagagaatctgaacccttgagcaaatctaaacattcggaagatgttaacgtcaaagtttcaaatgcacagagtgtaacctcagaaagagaaactaacatttaacaagaatcacatctctgatttcagtgtttatgactttatctaggagtttgtttttcattttgtttttttaaagtattagaaaaggttttagctgaaatgaggagtcacaattaaggatggaggtgatattttcctcaatggcaaattttaaattagtttttaaaaacttacttatttgggtagttaaattttgagattatgcatagaaagaatccatgctataggtttatttccatacctgactctgggtgtggtggttaaaatactaattttaaagtcttccagtgactttcggtcttggttatatggagaattctgaatcccaaacccctggtttaagtaggtagaaggaggatgcctaatcatacaaagtgaccctttatacatttcattttttatttgatattaaagtatgagatagagttgagagacaattaattatcccctcttacacacaaacacacatactcccacatacttacccacatgtacacagagtatctggagaataaaacccaaattcaaaaaaaaaaatgataatttatttttaaggtaaaaataatccatgaagataaaagaaacatatgtctgcgtgctactttacaatgttggttttaaagataagcacatgggtaaaaatgagggtgatccttattcaaaaataacatctgactactataaaaatatttgcatatataagtttgacaaagaaaagaaaatcaatgttaaaccattaaatctgagcactgttagacttgattaatccatgcacatgattttttttgagtagggagcattagtacctggtgctagagaatagaaccctcaaataatttttagaattcttacctaatatgtaaaagtctgcatgactcttaacaatgagtcacatccattgattttacagggattttagttcgtaatccagaaagtaataatcagggattttattttaatcaggcatcaatccagattcactgttatactgaaatatcaaagtaaaatcctagttggcaggattgtaagtagaccgaattctaatttttcccaacacatagtggtaattggaggttactgttatgaatactccatctgactacgactaagagagtgaggggtggttttaatgaaccctctaagctctctcagttccttcccttccacaaaatgcaagagcaaaagcaaactacaaacaggccttgtgctcaaccactggaaatgcctcctgggataagaatggcagcacttgaaaattctgccctctactgatgagacttcctgctgcctttggacataactaagccaggaaactttaaaagccttctagaaatagaggcactgtatgacttgcaatcgtaggtatagtttataacctgatagcaaaaaacttgaaatattgcagcccagtttaattcagcactttcccattttcataactatgtgaaaacatctgggaatttgaatcactcctgaatacagaggcatattctttttaaactataaataccattttgagtgagaaagtacttttaaacaagaaagaaattgtacattatgactaaagttataaatacaatatttatatctataaatctgaagtttaacatgattaatttaaaaagtatttagtgcttgacaaagtagtgtcactcttaagatgtcaaagggaattagccattttttttattgtaataaaggcaggtgctatttttttctggtgagattgcacctggataccaggcttttgtaatagttaacattaaacatttgattcataaagttaattcactgcttaagcatgtggctcatatttaggaagctatataaaattcagtttttcatttaacatttgctcttttgcatatgaagagatatttgtatttttcaaatgttaagtaaaacaagatgtgccaatatcataggtaaataaattagggaaaatgtgggaaaaaaaaaaaaaaaaaaaaaaaaaaaaaaaaaaa

SEQ ID NO: 155 - protein, 478 aa, homo sapiens
MPPMPSAPPVHPPPDGGWGWIVVGAAFISIGFSYAFPKAVTVFFKEIQQIFHTTYSEIAWISSIMLAVMYAGGPVSSVLVNKYGSRPVVIAGGLLCCLGMVLASFSSSVVQLYLTMGFITGLGLAFNLQPALTIIGKYFYRKRPMANGLAMAGSPVFLSSLAPFNQYLFNTFGWKGSFLILGSLLLNACVAGSLMRPLGPNQTTSKSKNKTGKTEDDSSPKKIKTKKSTWEKVNKYLDFSLFKHRGFLIYLSGNVIMFLGFFAPIIFLAPYAKDQGIDEYSAAFLLSVMAFVDMFARPSVGLIANSKYIRPRIQYFFSFAIMFNGVCHLLCPLAQDYTSLVLYAVFFGLGFGSVSSVLFETLMDLVGAPRFSSAVGLVTIVECGPVLLGPPLAGKLVDLTGEYKYMYMSCGAIVVAASVWLLIGNAINYRLLAKERKEENARQKTRESEPLSKSKHSEDVNVKVSNAQSVTSERETNI

SEQ ID NO: 156 - DNA, 771 bp, homo sapiens
agagaagcagacatcttctagttcctcccccactctcctctttccggtacctgtgagtcagctaggggagggcagctctcacccaggctgatagttcggtgacctggctttatctactggatgagttccgctgggagatggaacatagcacgtttctctctggcctggtactggctacccttctctcgcaagtgagccccttcaagatacctatagaggaacttgaggacagagtgtttgtgaattgcaataccagcatcacatgggtagagggaacggtgggaacactgctctcagacattacaagactggacctgggaaaacgcatcctggacccacgaggaatatataggtgtaatgggacagatatatacaaggacaaagaatctaccgtgcaagttcattatcgaatgtgccagagctgtgtggagctggatccagccaccgtggctggcatcattgtcactgatgtcattgccactctgctccttgctttgggagtcttctgctttgctggacatgagactggaaggctgtctggggctgccgacacacaagctctgttgaggaatgaccaggtctatcagcccctccgagatcgagatgatgctcagtacagccaccttggaggaaactgggctcggaacaagtgaacctgagactggtggcttctagaagcagccattaccaactgtaccttcccttcttgctcagccaataaatatatcctctttcactcagaaaaaaaaaaaaaaaaaaaaaaaaaaaaaa

SEQ ID NO: 157 - protein, 171 aa, homo sapiens
MEHSTFLSGLVLATLLSQVSPFKIPIEELEDRVFVNCNTSITWVEGTVGTLLSDITRLDLGKRILDPRGIYRCNGTDIYKDKESTVQVHYRMCQSCVELDPATVAGIIVTDVIATLLLALGVFCFAGHETGRLSGAADTQALLRNDQVYQPLRDRDDAQYSHLGGNWARNK

SEQ ID NO: 158 - DNA, 6730 bp, homo sapiens
gctggtggcgcccgccagccggcccgggagaggggacttgagcgcttcgcggccggtgcgcagcgcggctccggccccgcagtctgtctgcaagtggccatccccgcccccgactcctgcggccggtgcgggagctgtcagctgcacgttgcgggggtaccggagaagccggggttgccttctcccggttctgtgcgctaaccccggagcccggccccggggaactagggagcgtctccggctgcacagcgctcaggttttagggtttcctttgggccacccaaaatgttttttaaatactttggataagagctaaaccacctgccactggggacttccatactctcggctcccttgtcatctgatggcattttgattgtctcgaggccaagtgacttgctgtccatgatgagtgatgagaagaaccttggtgtgtcccaaaaattggtatcaccttcaaggagcacaagtagctgctcttccaagcaaggaagtcgacaggacagctgggaagtggtggaaggactgaggggggagatgaattacacccaggagccaccagttcagaaaggatttttgctgaaaaagaggaagtggcccttaaaaggctggcataagagattcttctatctggacaaaggaatcttgaaatatgccaagagccaaaccgatatagagagagagaagctgcatggctgcattgatgtcgggctctcagtgatgtctgtaaagaagtcatcaaaatgcatagaccttgacaccgaggagcacatctaccatctgaaggtcaagtcagaagaagtctttgatgagtgggtatcgaaacttcgccaccacagaatgtatcgtcagaatgaaattgccatgtttccacatgaagttaaccactttttctcagggtccaccatcacagactcttcatctggggtgtttgactccatttcaagtaggaagcgtagcagtatatcaaagcagaatttatttcaaactggaagcaatgtatcattttcttgtggtggtgagacacgagttccattatggttacagtcttcagaggacatggaaaaatgctccaaagacctggcgcactgtcatgcctacctggtagaaatgagccagctcctgcaaagcatggacgtcctgcatcggacatactcggcaccagctatcaacgccatccagggtggatcttttgaaagtcccaaaaaggaaaaaagatcgcacaggaggtggcggtccagagctattggcaaagatgctaaaggaacactgcaggtcccgaaacctttttctggcccagtaagactacactcctccaatcctaatttgtcaacactagattttggagaagagaaaaattattctgatggctctgaaacctcatcagagttttctaaaatgcaagaagatctgtgtcatattgcccataaagtttacttcactttaaggtcagcttttaatatcatgtcagcggagagagagaaactgaagcagctgatggagcaggatgcctcctcctccccgtctgctcaggtcattggtctgaagaacgccctgtcatccgccctagcacaaaacacagatcttaaagaacgcttacgcagaatccatgccgagtctctgctcctcgactcccccgctgtcgccaagtcgggtgacaatctggcagaggaaaactccagagatgaaaaccgagctctagttcatcagctttctaatgaaagtagactctccatcactgactccctttctgagttttttgatgctcaggaagttctgttatctccaagctcttcagaaaacgagatttctgatgatgactcatatgtcagtgacataagtgataatctttccttagataatctcagtaatgatttagataatgagagacagaccttggggcctgtccttgatagtggtcgggaagcgaagtcccggagaagaacgtgcctgccggcgccctgcccgagcagcagtaacatcagcctgtggaacatcctgaggaacaacatcgggaaggacctgtccaaggtggccatgccggtggagctgaacgagcccctgaacacgctgcagaggctctgcgaggagctggagtacagcgagctcctggacaaggccgcgcagattcccagccccctggaaaggatggtatatgtggcagcctttgccatatcagcgtatgcatctagctactaccgagctggaagcaagccatttaatccggttcttggagaaacatatgaatgtattcgggaggacaagggcttccagtttttttcagaacaggtcagccaccatccgcctatctctgcgtgtcatgctgagtctagaaattttgttttctggcaagatgtgagatggaaaaacaaattctggggcaaatccatggaaattgttccaattggcacaacccatgtgactctgccagtttttggggatcattttgagtggaacaaagtgacctcttgcatccataacatcttaagcgggcagaggtggattgagcactatggagagattgtcatcaagaacctgcatgatgattcctgctactgcaaagtgaattttataaaggcaaaatactggagcactaatgcccatgagattgaaggcacagtgtttgacaggagtggaaaagcggttcatcggctgtttgggaaatggcatgaaagcatctactgtggcggcggctcctcttctgcctgtgtatggagagcaaatcctatgccgaaaggctacgagcaatactatagcttcacacagtttgcgctggaattaaatgaaatggatccatcatcaaagtctttattgccacctactgacactcgatttaggccagaccagaggtttctagaggaagggaacttagaagaagctgaaatacaaaagcagaggattgaacaactgcagagagaaaggcggcgggtcttagaagaaaatcatgtggagcaccagcctcggtttttcaggaaatccgacgatgactcttgggtgagcaacggcacctatttggaacttagaaaagatcttggtttttccaaactggaccatcctgtcttatggtgaaaaagtaaagaagaaagataacattagtgtatttctcctgtgcttgccttctgaagtggcacaaacctgtgtttatatatttaaaagatactctaggatgatcacttgtgcttagcttagcattgtaactctttaagtctatattttcctcagtgcgtttctttacaatttcaaatgttaccctgattgtttatatgaatgtagaacaccttgacatttctttttatatataaactatttaataaaaatgaaagattgaatgttcatgtgtgggttaaaaaaagaagctttaacactaattttccaaaggttagggaagattccaattaaatttatgccttataaaattatgttgtagaaaaaaaatcaacctctcccaggtgcattaagaaataagaattcccagggttactcacccatgcgtaagctacccaagtttaatttggtagctgaaatatctttttgcctcagacagctcttgaattgctcatacagaacaattctgctggtgctggagtctgaagaatattttcatttgcattttagtggttagggagaggatataagattaatggaatgtatatttttatataagacgtatacggcaccttcttgaaaaggaagcatttgaacttgttcctccctatagttctattgccttatatgcaaaattgtaccctgttgctcagagaaattattcataagagaaaagaattccaattaattaaatatcacaatagcatcccagagagacagtaggaaatttctccttagtgagagctgagtccttgagaagttaagagactgtttcctgcttcccaccccaccccgttttttgtccctccgtttgatcacctccctgttgagtatggaatgtcccagtttaatataaaacatacagtttattccacacagcagtttgactttgtaaaagtttagcaaaataactgattgttttggataactcaacatgtttttcttaaatgctgttttagtattttctacctcttaataagcaccatattttagatcttgtataaaaagttgccatctgccttatagacaaatgtagagaattgatgttcttgctttgtgttgtgttctggtaaagctttaagtgagtgtcttacccctttcctatactttcttgttatccatatcattcttttgtgagttttgcagcagtcttgaataatacagattataactactgaaaggggaaccttcgtctttttaaatgtgtcatttcacattacaataatatgtgtagtagttgaattgtgttatcaaagcatgtccaacttctgtccagatgacattaaaaccaaagcctaattgttaagcctcttattctaaagtccatagcaatgctatggaatatcaagtataatgatgtagtaaaaagatttctccagaaaacactttgagatacttaaagaaattcagagcatatcgaatgttatgaatgaagagtaaaataattacaggaaaagaatgcatgatttttcattgtcacaccaaataaccagttggacaatattgcattttcaaaatggagagttatttaaagtggatgtgtagccttctggaatctgcacgtgactggcattttaaaacaactcattaaatattggattcattttatcgagatgccaagatgaacacaatgtgaatatcatttccatttctaagcagttgaatgacacagtcagattctttggtgtatgctttgttctttccatctcaagcatttatccaaattctgctcacagacatgaggaagcaggctgtagatttaagggcactcaaggggaaaacaaatgtagtttccacagtgtgaggataaatgtagaatcgtggtaatattggctgttaaattggcctgctccagagactggctcaaaaaagaaagaagcaacgaaaacaaaatgcacagcctgaatggacgtagcactgtcatgtggcatttggaaaatctttaattatcctaatgttatttcacttgcccttatgctttattttagagtcccagggacaactggatgaaacattacgtctgtagtcatcttatttgagatgggggtgggaacgaattaaaatatgatagagaactatatgcagattttaaaatctagtcagtactagcatctataaagggcttttctgaaatttaaacagcttggtgatgcatcctgatattataagcttaaaactatcttgagggggaaatgacttcttttctccttctgtcccttttctcaaaagcatctttcccccaaatgtatgtctctaggacattttatagttttaagaggaagaaaacagaaacgtggcatcatttgggaagaaccaaggtagaatttaattttctggactttaaatctcctggttaaataatgctaatcactgtaccatttgagttacatgttttaacctcttttttttttctaattattccatccaaaatttctggtgaattacacagaaatttttggaaatgggactttgtgcaggtaaccaccctgcacttcaggtaatgttcctgtcacagctgtcgactaccccacgctgcaggaaatccattcagaaatgagctaacagtctccagtgtagcaggagagccagtcacttccctccccaggccccaaagcaccccaaggctggtattccttgagtcataggtattaataataaaagcctcaatgcagcttctccatgtagttcctctcctacaagccaggtggattctggtcctaactaaagagatgggagttcacctgagggcaagaagtacccaggatgcccaaacagccgcacaggtgtcctgtgcttcctgtgagacttcctgggggaaatatacaaactaatatattttttaatgtttacgtcatttacactgctgcttttctcatattctgcttttaattacttgtagtaaatcatttgtttgggcttcaagcactgtcttccatctgcatcttccagatttatcatgagtgatcttgttctactgttaaagatgtcaagcctaaaaagtaataaagtttttatttggctgttgaaccttgatgtagcccctactacatacactacaagttatgccttctggctactacagaatctccgcagaccttttagttatgagtagaagcaataagaaggtgtccttatggtcttaggaataatagttccaatgtattggcataatttgtttgaatgtctttattttgatattaacaccggcataaatctatttttgctaccagatgatagctattttcatttgctctattttcctctgcattgtactaatctgttactcagtgttagtcttcatttttctgtgttggaaacctgcgtcatgtaaatatctgcaaatcatgacagtctaaagtgcaaaccattttcagagactttggggaatgcagtgatcagaagtggctaatttattttatttctgattattttatccagagggtacttttttaatggatatttgtaaatcttccacttaaccactgaaaattattttgttttaatcccacccttccatccatacctctgcctccccaaaaagctcctattaatttgcttatccccctcatgtagctagttgaatgtgaataaataacatggaaaaaaaaaaaaaaaaaaaaaaaaa

SEQ ID NO: 159 - protein, 887 aa, homo sapiens
MMSDEKNLGVSQKLVSPSRSTSSCSSKQGSRQDSWEVVEGLRGEMNYTQEPPVQKGFLLKKRKWPLKGWHKRFFYLDKGILKYAKSQTDIEREKLHGCIDVGLSVMSVKKSSKCIDLDTEEHIYHLKVKSEEVFDEWVSKLRHHRMYRQNEIAMFPHEVNHFFSGSTITDSSSGVFDSISSRKRSSISKQNLFQTGSNVSFSCGGETRVPLWLQSSEDMEKCSKDLAHCHAYLVEMSQLLQSMDVLHRTYSAPAINAIQGGSFESPKKEKRSHRRWRSRAIGKDAKGTLQVPKPFSGPVRLHSSNPNLSTLDFGEEKNYSDGSETSSEFSKMQEDLCHIAHKVYFTLRSAFNIMSAEREKLKQLMEQDASSSPSAQVIGLKNALSSALAQNTDLKERLRRIHAESLLLDSPAVAKSGDNLAEENSRDENRALVHQLSNESRLSITDSLSEFFDAQEVLLSPSSSENEISDDDSYVSDISDNLSLDNLSNDLDNERQTLGPVLDSGREAKSRRRTCLPAPCPSSSNISLWNILRNNIGKDLSKVAMPVELNEPLNTLQRLCEELEYSELLDKAAQIPSPLERMVYVAAFAISAYASSYYRAGSKPFNPVLGETYECIREDKGFQFFSEQVSHHPPISACHAESRNFVFWQDVRWKNKFWGKSMEIVPIGTTHVTLPVFGDHFEWNKVTSCIHNILSGQRWIEHYGEIVIKNLHDDSCYCKVNFIKAKYWSTNAHEIEGTVFDRSGKAVHRLFGKWHESIYCGGGSSSACVWRANPMPKGYEQYYSFTQFALELNEMDPSSKSLLPPTDTRFRPDQRFLEEGNLEEAEIQKQRIEQLQRERRRVLEENHVEHQPRFFRKSDDDSWVSNGTYLELRKDLGFSKLDHPVLW

SEQ ID NO: 160 - DNA, 5472 bp, homo sapiens
tggataggagagctggcgcagctgccctggtggcagtggctgaagtggcggcggcttcggcggctgcggcggctgcaacagcttcgggctcggggttttggcggcggcgccggcgggctaggctgcgcggtgcggaccccggcgcgcggtccgggttgctggggcggcgcgtagatggagtcttgctacattgcccaggctggtcttgaactgctaggctcaagcagttctcccaccttgacctcccaaagcgctgagattacagaagatgcctctaatggaggagtttctgagcagcacccctggcccagtggctttgaaagggagctcaaaccagagactatttcaagccctggatatcatatcctgagggccacaggagaagagaacatggctgtgagtttggatgacgacgtgccgctcatcctgaccttggatgagggtggcagtgccccactggctccctccaacggcctgggccaagaagagctacctagcaaaaatggcggcagctatgccatccacgactcccaggcccccagtctcagctctgggggtgagagttccccctccagccccgcacacaactgggagatgaattaccaagaggcagcaatctacctccaggaaggcgagaacaacgacaagttcttcacccaccccaaggatgccaaggcgctggcggcctacctctttgcacacaatcacctcttctacctgatggagctggccacggccctgctgctgctgctgctctccctgtgcgaggcccccgccgtccccgcactccggcttggcatctatgtccacgccaccctggagctgtttgccctgatggtggtagtgtttgaactctgcatgaagttacgctggctgggcctccacaccttcatccggcacaagcggaccatggtcaagacctcggtgctggtggtgcagtttgtcgaggccatcgtggtgttggtacggcagatgtcccatgtgcgggtgacccgagcactgcgctgcattttcctggtggactgtcggtattgcggtggcgtccggcgcaacctgcggcagatcttccagtccctgccgcccttcatggacatcctcctgctgctgctgttcttcatgatcatctttgccatcctcggtttctacttgttctcccctaacccttcagacccctacttcagcaccctggagaacagcatcgtcagtctgtttgtccttctgaccacagccaatttcccagatgtgatgatgccctcctactcccggaacccctggtcctgcgtcttcttcatcgtgtacctctccatcgagctgtatttcatcatgaacctgcttctggctgtggtgttcgacaccttcaatgacattgagaaacgcaagttcaagtctttgctactgcacaagcgaaccgctatccagcatgcctaccgcctgctcatcagccagaggaggcctgccggcatctcctacaggcagtttgaaggcctcatgcgcttctacaagccccggatgagtgccagggagcgctatcttaccttcaaggccctgaatcagaacaacacacccctgctcagcctaaaggacttttacgatatctacgaagttgctgctttgaagtggaaggccaagaaaaacagagagcactggtttgatgagcttcccaggacggcgctcctcatcttcaaaggtattaatatccttgtgaagtccaaggccttccagtatttcatgtacttggtggtggcagtcaacggggtctggatcctcgtggagacatttatgctgaaaggtgggaacttcttctccaagcacgtgccctggagttacctcgtctttctaactatctatggggtggagctgttcctgaaggttgccggcctgggccctgtggagtacttgtcttccggatggaacttgtttgacttctccgtgacagtgttcgccttcctgggactgctggcgctggccctcaacatggagcccttctatttcatcgtggtcctgcgccccctccagctgctgaggttgtttaagttgaaggagcgctaccgcaacgtgctggacaccatgttcgagctgctgccccggatggccagcctgggcctcaccctgctcatcttttactactccttcgccatcgtgggcatggagttcttctgcgggatcgtcttccccaactgctgcaacacgagtacagtggcagatgcctaccgctggcgcaaccacaccgtgggcaacaggaccgtggtggaggaaggctactattatctcaataattttgacaacatcctcaacagctttgtgaccctgtttgagctcacagttgtcaacaactggtacatcatcatggaaggcgtcacctctcagacctcccactggagccgcctctacttcatgaccttttacattgtgaccatggtggtgatgacgatcattgtcgcctttatcctcgaggccttcgtcttccgaatgaactacagccgcaagaaccaggactcggaagttgatggtggcatcacccttgagaaggaaatctccaaagaagagctggttgccgtcctggagctctaccgggaggcacggggggcctcctcggatgtcaccaggctgctggagaccctctcccagatggagagataccagcaacattccatggtgtttctgggacggcgatcaaggaccaagagcgacctgagcctgaagatgtaccaggaggagatccaggagtggtatgaggagcatgccagggagcaagagcagcagcgacaactcagcagcagtgcagcccccgccgcccagcagcccccaggcagccgccagcgctcccagaccgttacctagcccagcgcccgaaagccgtctcttctatgcaataacacaatagtattactctactgcgatgtacggaactgcggtgtgtgtacacatactcacgtatatgcacatatttatatacaggaagaaaaaagacagacaagatggggcttggtttataaccaccttgccctgtcttccttaactccagaagccagtttggtgaggggtgggggtgcggccaccaggtctgagctcttcctactgtggaaggctccagaaggcccttcacaaggagacccctcacctggatccagtcgactgcggggcttgcccctcatgtgggctggcctccatcggccacgtccaaagctgtcactgctactgcttcaggctcacatccccccgacctgatggcgtgcccgccccctctccctgcggcccatgccacaggtttctgtgttttgctttagggacagaaccacttaggaaggaaagaactcccggtctccagggtggtatttcagtgtctgtgataatgtcacgcaacacctcttcggggaccagtgcccaggatctaatggaagcggaattggggcaactgggcccatgtggccagagctcagttagccagtgccgggcggccacagattacactgaccaatctcctcccttggctctgcaagcctcccacccagccttctctggcttaacccttgttggcgaaaactcttccacagtggcctccttggggacccagaacccggaggaaggggcatgaggcaggaagtggggccgatgtctgcaacccagaccacttcgtggaatgggctcttgaccaaatccctttttttgcgatttacccgttcaagcaaaacaacgttttggttaactaaggattgtgctaaagccgataccaggtccttcacacgtgtgcactaggaacaggagcgaacagcacagagagacgctccctgtgggacgcagcagccccgtggccccggcccagttcccagccaccctccctggctctgctcacaccagagatttccatagcaggagcggttggtgcagaagtaggttcagatgaacctcagttaacgtcgccacccctcctcccaccatggtaccctgtaggagccctgtatgacatctgagcgtggtggaggtaggagggttgccagctgcagtgaccctgccacagaggcagggtcagtgcagaggtcgctttggttccgcttccctgggccacagaacggaacacagcataggttctgcagcaggagccgcagtggcaggatggagggtgcgaagggcaaggagtgcactgctgggcattcctggccagccccggccctctggtgcctgcttcctgtgacttcagaaggcaggtggacagagcctccctctggccttgtcctcttcccagccacagaacgggcagggtggcacccgaccccaggggagcagtacctggtcccccaccccctcctcccaaccacctccaaggccaagctgggtcccatagccagcacggcatggttctccccttccccccttcccaggtcaggggagttggacaagtagcaggtgtttgtttttaaagcacagccctttgggaaagcaacacattattgagactcactgtgattcccccgggagtcagactggctttgtcctcttcctctctggagggccatgggccatcagcaggagctccacatcgagccccaggccagaaccccctccctttcacagagagggaactttattgcacaattgggtgccttttagcttttgtgtgttgaaatgggcgttttggaagcaagggtcaggggacagcttctaaaggtgtgagtctctgacctgagcatctgggcctcgcctgggcccttcttcctccccaggggtggaaacgtggaggggccagcagcaccccggggtctgcccaggggagtcaaggccccgaggtgggggggcctattccaggaggagtgggatctcggccctgtccagagcgagttaatgtgtccatctgcccaaccctgtcctgagaaaggacctggttttggccaggacctgacaaatacccaatggcagcagtgtcaacagacgggagtccagccagggtgggtgcccttgtcattgaggttagggacagctatccccaggttatgcctggccccacccagcagggagttggggtccccccacaggctgtgagctctgtgggccctgggatgtgatctagctcagatgccctctcatccttgatgtcatagttgagtgcacccaagtggcacccactggcggccaggggcacagcctggtggtggtggcaatagaactgtgcccctcctcagctcctcgcttcccctcccacagccccagccttactccaccatgcggacaatcattttgtacggatcacgggagcaatgctgtacggttttgtacactggtggtttgtttcctagaaaacccattgtgtctctggatttctagcacattactaaaagagcctctgctttgtaaaaaaaaaaaaaaaaaaaaaaaaaaaaaaaaaaaaaaaaaaaaaaaaaaaaaaaaaaaaaaaaaaaaaaaaaaaaaaaaaaaaaaaaaaaaaaaaaaaaaaaaaaaaaaaaaaaaaaaaaaaaa

SEQ ID NO: 161 - protein, 888 aa, homo sapiens
MESCYIAQAGLELLGSSSSPTLTSQSAEITEDASNGGVSEQHPWPSGFERELKPETISSPGYHILRATGEENMAVSLDDDVPLILTLDEGGSAPLAPSNGLGQEELPSKNGGSYAIHDSQAPSLSSGGESSPSSPAHNWEMNYQEAAIYLQEGENNDKFFTHPKDAKALAAYLFAHNHLFYLMELATALLLLLLSLCEAPAVPALRLGIYVHATLELFALMVVVFELCMKLRWLGLHTFIRHKRTMVKTSVLVVQFVEAIVVLVRQMSHVRVTRALRCIFLVDCRYCGGVRRNLRQIFQSLPPFMDILLLLLFFMIIFAILGFYLFSPNPSDPYFSTLENSIVSLFVLLTTANFPDVMMPSYSRNPWSCVFFIVYLSIELYFIMNLLLAVVFDTFNDIEKRKFKSLLLHKRTAIQHAYRLLISQRRPAGISYRQFEGLMRFYKPRMSARERYLTFKALNQNNTPLLSLKDFYDIYEVAALKWKAKKNREHWFDELPRTALLIFKGINILVKSKAFQYFMYLVVAVNGVWILVETFMLKGGNFFSKHVPWSYLVFLTIYGVELFLKVAGLGPVEYLSSGWNLFDFSVTVFAFLGLLALALNMEPFYFIVVLRPLQLLRLFKLKERYRNVLDTMFELLPRMASLGLTLLIFYYSFAIVGMEFFCGIVFPNCCNTSTVADAYRWRNHTVGNRTVVEEGYYYLNNFDNILNSFVTLFELTVVNNWYIIMEGVTSQTSHWSRLYFMTFYIVTMVVMTIIVAFILEAFVFRMNYSRKNQDSEVDGGITLEKEISKEELVAVLELYREARGASSDVTRLLETLSQMERYQQHSMVFLGRRSRTKSDLSLKMYQEEIQEWYEEHAREQEQQRQLSSSAAPAAQQPPGSRQRSQTVT

SEQ ID NO: 162 - DNA, 5114 bp, homo sapiens
aggtggtgcaacgcctggcccggcccatcccatcccggccacccgggcagcgggaccaggcgtctggggcacagcatgcggggcgtgtggccgcccccggtgtccgccctgctgtcggcgctggggatgtcgacgtacaagcgggccacgctggacgaggaggacctggtggactcgctctccgagggcgacgcataccccaacggcctgcaggtgaacttccacagcccccggagtggccagaggtgctgggctgcacggacccaggtggagaagcggctggtggtgttggtggtacttctggcggcaggactggtggcctgcttggcagcactgggcatccagtaccagacaagatccccctctgtgtgcctgagcgaagcttgtgtctcagtgaccagctccatcttgagctccatggaccccacagtggacccctgccatgacttcttcagctacgcctgtgggggctggatcaaggccaacccagtccctgatggccactcacgctgggggaccttcagcaacctctgggaacacaaccaagcaatcatcaagcacctcctcgaaaactccacggccagcgtgagcgaggcagagagaaaggcgcaagtatactaccgtgcgtgcatgaacgagaccaggatcgaggagctcagggccaaacctctaatggagttgattgagaggctcgggggctggaacatcacaggtccctgggccaaggacaacttccaggacaccctgcaggtggtcaccgcccactaccgcacctcacccttcttctctgtctatgtcagtgccgattccaagaactccaacagcaacgtgatccaggtggaccagtctggcctgggcttgccctcgagagactattacctgaacaaaactgaaaacgagaaggtgctgaccggatatctgaactacatggtccagctggggaagctgctgggcggcggggacgaggaggccatccggccccagatgcagcagatcttggactttgagacggcactggccaacatcaccatcccacaggagaagcgccgtgatgaggagctcatctaccacaaagtgacggcagccgagctgcagaccttggcacccgccatcaactggttgccttttctcaacaccatcttctaccccgtggagatcaatgaatccgagcctattgtggtctatgacaaggaataccttgagcagatctccactctcatcaacaccaccgacagatgcctgctcaacaactacatgatctggaacctggtgcggaaaacaagctccttccttgaccagcgctttcaggacgccgatgagaagttcatggaagtcatgtacgggaccaagaagacctgtcttcctcgctggaagttttgcgtgagtgacacagaaaacaacctgggctttgcgttgggccccatgtttgtcaaagcaaccttcgccgaggacagcaagagcatagccaccgagatcatcctggagattaagaaggcatttgaggaaagcctgagcaccctgaagtggatggatgaggaaacccgaaaatcagccaaggaaaaggccgatgccatctacaacatgataggataccccaacttcatcatggatcccaaggagctggacaaagtgtttaatgactacactgcagttccagacctctactttgaaaatgccatgcggtttttcaacttctcatggagggtcactgccgatcagctcaggaaagcccccaacagagatcagtggagcatgaccccgcccatggtgaacgcctactactcgcccaccaagaatgagattgtgtttccggccgggatcctgcaggcaccattctacacacgctcctcacccaaggccttaaactttggtggcataggtgtcgtcgtgggccatgagctgactcatgcttttgatgatcaaggacgggagtatgacaaggacgggaacctccggccatggtggaagaactcatccgtggaggccttcaagcgtcagaccgagtgcatggtagagcagtacagcaactacagcgtgaacggggagccggtgaacgggcggcacaccctgggggagaacatcgccgacaacgggggtctcaaggcggcctatcgggcttaccagaactgggtgaagaagaacggggctgagcactcgctccccaccctgggcctcaccaataaccagctcttcttcctgggctttgcacaggtctggtgctccgtccgcacacctgagagctcccacgaaggcctcatcaccgatccccacagcccctctcgcttccgggtcatcggctccctctccaattccaaggagttctcagaacacttccgctgcccacctggctcacccatgaacccgcctcacaagtgcgaagtctggtaaggacgaagcggagagagccaagacggaggaggggaaggggctgaggacgagacccccatccagcctccagggcattgctcagcccgcttggccacccggggccctgcttcctcacactggcgggttttcagccggaaccgagcccatggtgttggctctcaacgtgacccgcagtctgatcccctgtgaagagccggacatcccaggcacacgtgtgcgccaccttcagcaggcattcgggtgctgggctggtggctcatcaggcctgggccccacactgacaagcgccagatacgccacaaataccactgtgtcaaatgctttcaagatatatttttggggaaactattttttaaacactgtggaatacactggaaatcttcagggaaaaacacatttaaacacttttttttttaaggaaagaattggtatatttattatgttctgtttttctaaataacctgtggacaagggaagccccactgatttactccctctcttccccactccctgtgaggctgggctgaggcacggatccctgggccacagagcaagtctccaaatcagacagctgcctcagcccctgggatgtgtgatttcagctcctgtcacctcatgcaagggcgtggagaccagtagaggtgtggaggccaggcagagagaggagcctgctctgcggggggcccagctcatgggcactgccccttcagctagcctgcctccgtcccctgagtccaacagtgggagccctagctgggaagttctgatccccaaagccacagcaggggactgatggctatagcagaatgaggtcgggtcaggaccctcaaacaccatctgggaacaccaagcaccctgaatcgagactgcaggagccctgcggggtgagactgtgtcagagatacactgctggccacaagtgtcccctctcagtcccaccttttcgggctgtcccatgtctatctcaggggcccgttacctctctgcagcagtcccccatcccagccacaccagggtctgtccggccaaccctcttccccagggaaaggagaaaagagaaaacaggctgggcccggtggctcactcctgtaatcccagcactttgggaggttgaggtgggcggatcacctgaggtcaggagtttgagaccagcctggccaacgtggtgaaaccccatctctactaaaaaaaattacaaaaattagccgggagtggtggtgggcacctgtaatcccagttactcgggaggctgaggcaagagaatctcttgagctcaggaggcagaggttgcagtgagctgagattgcgccactgcactccagcctgggtgacagagggagactccgtcccaaaaaaaagaaaagagaaacagctgtcacctcccgcaggacccaaatcctctctctgagcaccgtcatccaccacatggctgggcctggctcccaggaccagtccagtcctctagtgccttatctgaggctgcagccgccagtctccaccccaaggagacagcccctgctcctagatgcccttggcctccgcagtgcagcccccaggtgtcctgactgaagcacaggccatagccccatttccccggtgcctgcagggctaacctccacgggagcccaggagctctggccggcaggtccatggcacagggcatcggaagactgcaaaactgctggacttaccctgggctgcagtccattgtcggcccctgggttgaatcaagatagtacttgcagctagatggatgcttttagccaggggacattgtgaggggaagattcctccacccagtctggcctgtggtgtctgtctcctccctgagaccacagcttctccagtagcagactcatgggcgccaccaagtggaagcacctggagcggcctctgccatccagtggggaagccaggccccgagacggaggtgggggcagcacgtgccctccacagccaccgctttcccgcctcagcagcccaggcctcctggcccagccctgcctggacagtgctctcccctcacccgggaagctggaatcctcctgcccgagaggaagcagacggcacagggacacccctgccaccttgggatctgcctccaagctggtgcagggtatcgagagtggattccagatggaggtcctggtcccagcacgcagcagtcctggtagctctgcagaggagacaggaacccgagaagtagctgaagcagaagccagccgcagtccccttgccacatagaggcgggcttctcccagccatggtgtcccctctgcctcccctcccccgaccctcctgccttccgcgtggagggtggtggtcctgtagtgtcagcaccagcaccatgggcttggaccccctccctggacacaggcaggtgtcctagggctgggggtgcagcccgagggaatggagaccacactcatggctcaggtctgccggggccggcagggggttggggaagaagagggctcaggcccagcaggggtggaagcccctgccactgccactacccgctccagagctttaaggaaaatgaagtgagacccctccccttaggcctggggagccatagggctggcttctctgtgggtgcgtggacgtggggttgggagctgggaatctattttttgtattatgttttgagctactgtagttttggcgtggcactattgtaatggaaataaaatacttgtacggagggcaaaaaaaaaaaaaaaaaa

SEQ ID NO: 163 - protein, 770 aa, homo sapiens
MRGVWPPPVSALLSALGMSTYKRATLDEEDLVDSLSEGDAYPNGLQVNFHSPRSGQRCWAARTQVEKRLVVLVVLLAAGLVACLAALGIQYQTRSPSVCLSEACVSVTSSILSSMDPTVDPCHDFFSYACGGWIKANPVPDGHSRWGTFSNLWEHNQAIIKHLLENSTASVSEAERKAQVYYRACMNETRIEELRAKPLMELIERLGGWNITGPWAKDNFQDTLQVVTAHYRTSPFFSVYVSADSKNSNSNVIQVDQSGLGLPSRDYYLNKTENEKVLTGYLNYMVQLGKLLGGGDEEAIRPQMQQILDFETALANITIPQEKRRDEELIYHKVTAAELQTLAPAINWLPFLNTIFYPVEINESEPIVVYDKEYLEQISTLINTTDRCLLNNYMIWNLVRKTSSFLDQRFQDADEKFMEVMYGTKKTCLPRWKFCVSDTENNLGFALGPMFVKATFAEDSKSIATEIILEIKKAFEESLSTLKWMDEETRKSAKEKADAIYNMIGYPNFIMDPKELDKVFNDYTAVPDLYFENAMRFFNFSWRVTADQLRKAPNRDQWSMTPPMVNAYYSPTKNEIVFPAGILQAPFYTRSSPKALNFGGIGVVVGHELTHAFDDQGREYDKDGNLRPWWKNSSVEAFKRQTECMVEQYSNYSVNGEPVNGRHTLGENIADNGGLKAAYRAYQNWVKKNGAEHSLPTLGLTNNQLFFLGFAQVWCSVRTPESSHEGLITDPHSPSRFRVIGSLSNSKEFSEHFRCPPGSPMNPPHKCEVW

SEQ ID NO: 164 - DNA, 4326 bp, homo sapiens
gtcagctgtgccccggtcgccgagtggcgaggaggtgacggtagccgccttcctatttccgcccggcgggcagcgctgcggggcgagtgccagcagagaggcgctcggtcctccctccgccctcccgcgccgggggcaggccctgcctagtctgcgtctttttcccccgcaccgcggcgccgctccgccactcgggcaccgcaggtagggcaggaggctggagagcctgctgcccgcccgcccgtaaaatggtcccctcggctggacagctcgccctgttcgctctgggtattgtgttggctgcgtgccaggccttggagaacagcacgtccccgctgagtgcagacccgcccgtggctgcagcagtggtgtcccattttaatgactgcccagattcccacactcagttctgcttccatggaacctgcaggtttttggtgcaggaggacaagccagcatgtgtctgccattctgggtacgttggtgcacgctgtgagcatgcggacctcctggccgtggtggctgccagccagaagaagcaggccatcaccgccttggtggtggtctccatcgtggccctggctgtccttatcatcacatgtgtgctgatacactgctgccaggtccgaaaacactgtgagtggtgccgggccctcatctgccggcacgagaagcccagcgccctcctgaagggaagaaccgcttgctgccactcagaaacagtggtctgaagagcccagaggaggagtttggccaggtggactgtggcagatcaataaagaaaggcttcttcaggacagcactgccagagatgcctgggtgtgccacagaccttcctacttggcctgtaatcacctgtgcagccttttgtgggccttcaaaactctgtcaagaactccgtctgcttggggttattcagtgtgacctagagaagaaatcagcggaccacgatttcaagacttgttaaaaaagaactgcaaagagacggactcctgttcacctaggtgaggtgtgtgcagcagttggtgtctgagtccacatgtgtgcagttgtcttctgccagccatggattccaggctatatatttctttttaatgggccacctccccacaacagaattctgcccaacacaggagatttctatagttattgttttctgtcatttgcctactggggaagaaagtgaaggaggggaaactgtttaatatcacatgaagaccctagctttaagagaagctgtatcctctaaccacgagaccctcaaccagcccaacatcttccatggacacatgacattgaagaccatcccaagctatcgccacccttggagatgatgtcttatttattagatggataatggttttatttttaatctcttaagtcaatgtaaaaagtataaaaccccttcagacttctacattaatgatgtatgtgttgctgactgaaaagctatactgattagaaatgtctggcctcttcaagacagctaaggcttgggaaaagtcttccagggtgcggagatggaaccagaggctgggttactggtaggaataaaggtaggggttcagaaatggtgccattgaagccacaaagccggtaaatgcctcaatacgttctgggagaaaacttagcaaatccatcagcagggatctgtcccctctgttggggagagaggaagagtgtgtgtgtctacacaggataaacccaatacatattgtactgctcagtgattaaatgggttcacttcctcgtgagccctcggtaagtatgtttagaaatagaacattagccacgagccataggcatttcaggccaaatccatgaaagggggaccagtcatttattttccattttgttgcttggttggtttgttgctttatttttaaaaggagaagtttaactttgctatttattttcgagcactaggaaaactattccagtaatttttttttcctcatttccattcaggatgccggctttattaacaaaaactctaacaagtcacctccactatgtgggtcttcctttcccctcaagagaaggagcaattgttcccctgagcatctgggtccatctgacccatggggcctgcctgtgagaaacagtgggtcccttcaaatacatagtggatagctcatccctaggaattttcattaaaatttggaaacagagtaatgaagaaataatatataaactccttatgtgaggaaatgctactaatatctgaaaagtgaaagatttctatgtattaactcttaagtgcacctagcttattacatcgtgaaaggtacatttaaaatatgttaaattggcttgaaattttcagagaattttgtcttcccctaattcttcttccttggtctggaagaacaatttctatgaattttctctttatttttttttataattcagacaattctatgacccgtgtcttcatttttggcactcttatttaacaatgccacacctgaagcacttggatctgttcagagctgaccccctagcaacgtagttgacacagctccaggtttttaaattactaaaataagttcaagtttacatcccttgggccagatatgtgggttgaggcttgactgtagcatcctgcttagagaccaatcaacggacactggtttttagacctctatcaatcagtagttagcatccaagagactttgcagaggcgtaggaatgaggctggacagatggcggaagcagaggttccctgcgaagacttgagatttagtgtctgtgaatgttctagttcctaggtccagcaagtcacacctgccagtgccctcatccttatgcctgtaacacacatgcagtgagaggcctcacatatacgcctccctagaagtgccttccaagtcagtcctttggaaaccagcaggtctgaaaaagaggctgcatcaatgcaagcctggttggaccattgtccatgcctcaggatagaacagcctggcttatttggggatttttcttctagaaatcaaatgactgataagcattggatccctctgccatttaatggcaatggtagtctttggttagctgcaaaaatactccatttcaagttaaaaatgcatcttctaatccatctctgcaagctccctgtgtttccttgccctttagaaaatgaattgttcactacaattagagaatcatttaacatcctgacctggtaagctgccacacacctggcagtggggagcatcgctgtttccaatggctcaggagacaatgaaaagcccccatttaaaaaaataacaaacattttttaaaaggcctccaatactcttatggagcctggatttttcccactgctctacaggctgtgactttttttaagcatcctgacaggaaatgttttcttctacatggaaagatagacagcagccaaccctgatctggaagacagggccccggctggacacacgtggaaccaagccagggatgggctggccattgtgtccccgcaggagagatgggcagaatggccctagagttcttttccctgagaaaggagaaaaagatgggattgccactcacccacccacactggtaagggaggagaatttgtgcttctggagcttctcaagggattgtgttttgcaggtacagaaaactgcctgttatcttcaagccaggttttcgagggcacatgggtcaccagttgctttttcagtcaatttggccgggatggactaatgaggctctaacactgctcaggagacccctgccctctagttggttctgggctttgatctcttccaacctgcccagtcacagaaggaggaatgactcaaatgcccaaaaccaagaacacattgcagaagtaagacaaacatgtatatttttaaatgttctaacataagacctgttctctctagccattgatttaccaggctttctgaaagatctagtggttcacacagagagagagagagtactgaaaaagcaactcctcttcttagtcttaataatttactaaaatggtcaacttttcattatctttattataataaacctgatgcttttttttagaactccttactctgatgtctgtatatgttgcactgaaaaggttaatatttaatgttttaatttattttgtgtggtaagttaattttgatttctgtaatgtgttaatgtgattagcagttattttccttaatatctgaattatacttaaagagtagtgagcaatataagacgcaattgtgtttttcagtaatgtgcattgttattgagttgtactgtaccttatttggaaggatgaaggaatgaatctttttttcctaaatcaaaaaaaaaaaaaaaaaa

SEQ ID NO: 165 - protein, 160 aa, homo sapiens
MVPSAGQLALFALGIVLAACQALENSTSPLSADPPVAAAVVSHFNDCPDSHTQFCFHGTCRFLVQEDKPACVCHSGYVGARCEHADLLAVVAASQKKQAITALVVVSIVALAVLIITCVLIHCCQVRKHCEWCRALICRHEKPSALLKGRTACCHSETVV

SEQ ID NO: 166 - RNA, 4416 nt, homo sapiens
gaagcaccccacccggcgcggggggaaaccaggcgcccggaagggaagggaagggagccgggcgcgcgggcagcccgcgcccgaccgcgcccacggcccggcaccgccccccccccaccacaccgaggaaaacccccgcccccaacaaacagcaggcccacgggccgcaaaccgcccggcccagcaacaaggccggccgagagcgagagcccagggaaggaagggagcgaaagccgggaggcgaaaccagcagaaaccaacggcaaggccgaaaaccccacgaagacagacaccaaagcaggaggcacgcgcgacaaggaaagcacacaagaaagacaaggaggacacaaaaggaagcaagacaagaaacaacaaaacccgcaaagcagcacacggagaacacacgggagagcacaggacaagaaggaaagcccgaagagggacacgacccaacgaaaaaagacagcagacaaaaggacaaccaaacccaccacaagaggaaaaaagaggcccccgcaccaagaaagacgcagaccaggcggagggggggggagaacgacagggcagccaccgccaaagacaaaaaaacgggagaaacaaacagacagagagaagacaaacgcaagggaagaagaaaggacagagcagcgacggaagggaccagaggagaccgccaacagaccagacaggaccagggaggagcaggaaagagaagggaagcaagaacgcgggaggagacacaggaaaggaagggcaagaaaccggggccgaagccaggcagagaagcaggagacagaaaagagagaagcgagcagagcagaaaagagcaaaaccagaccaaggaagagcacaacaacaagacacgcgcaccgaggcaccgaagaggaccagaggcagggcacaccagaagccagggcagagaaaaggaacaccagagcacacaaaccaccgccaaggaagaggcaaaacgcaccccgaaagaacacaaaaacgcagaaaagaagaagaaacaggccccggcagacaccgcaacagaacccaacgaacgcacagacacacaaaacaggaagagacaaagacaggacgcagcggggaacgaaacaaagcacgaggggaaaagccaaaacaaacacaccaaaagagcacaagaacacagggagagaagccaagaagcccaaacgcaagaaacgccccacggcccaagccacacaaagcagaagaaagacagcgaaccggaagggcgaccaagaacaggaccaagacaccaggccaccgcccagcacaccaggcagcccacacgaccacagaacggcaaaagaagagaaaaacccccaagaacaaccgaaccaaaaaaacgaaccgggaagaacaaacccaaggggccaggaacaacgcaaccccacaaaaggggcacggggggcccaacaggcaaccagccccagggcagggcaagcggcgccaacaggggggccccaaagacaaaaggaacagaagacaaagggcggagaggaagaaaaggcaaggggagaaaacaagccaacgcaccaaagaacaagaaacaacaagccacccaacaacaaggggccacgacagccacagcccgggacaagaggaacaaccaaaaacacaacacagcgagcagccagccaaccaaggcccaaaaaaaaaaagaaaaccagcgcacaaacaggaaaaggaaaagaccagaagacacgaagcgagaaggacaaaagcgaaggggggggaagaagcacgccgggagagccaggagaaaagcacccagaaaaagcacagaccaaagcagccaccagccccccaccccgcagcagaagcgagaagccgagcccgcacagcacggagaggcaagcccagcagccaccaaagaacccgccccaaaagcaaagcgaagcacaaccaaggcagaagagcccaaaaagcgacagaaaccaccacggagagaaaaaaggggaaaagagcaagcggacagacaggcagccgaaccaccccgaaccaggcaaagaaaacccgccaagaacaagacagcccaacgcaaagcaaagaaccccaggacagcacagaaacacaaagccgaagagacaacccccagaccaggggacaaccaccaaggccagaagagacaccaccccacacccaaacccccaccagaaaacacagggacgacacagcgaggggcacaagaagagccacaagagaacccgaccacaccaaagcaacagggagaaaagaaaggcaacacacaggaccagaacaggacgccaggaagaacccgaacgcgcgcaaaaaaggagccacaaaaggacagggacagaccagaaccaggaaagaacccaccaaggccaaccccaaaaacgcaaccacagcacgcccagacccacaacgggccagcgaccagaacaggccagcaagagcgcagcgccaaaagcaaacgacgaccccaggggcaacaccaccaacacggcagcccgcagccaagaaccacccgaaaggaccagccaaaggaaacaggagaaagacaagaacagccagaaggagacaaagagaggacagaagaccgacacaccgcccaaaaagaaaagcggaagacagaaaaggaagagcggagggacaagaaccaaaagagagcaagagacaaaaagaacacacaggaaaagacccagaggggaacgaaaaaggcaaaacacaaacacagagaacacagcgaacacggagaaaagcccacaaggacaaagggaaagcgcccacaccgggcaccaacacagaacacgcacccacgaagagagaagcggaagaacggacagcacagagcaggaagaggcagggccgaaaccccgaagagcacgggggccagggcgcccccacagggcgaccggacgagagagagaggacaagggaagaggagaagacaggaaaaagaggaagaggaggaggaaaagagaggaagaagcaggaagaaaaagaaggaaaaaccacaaggggagaggaagaggaggaggaggaggaagaagggaagaagaagaggagaagaggcagagaagagggagaagaagcaaaaacgaaggcgagaaggagacagggcgaaagcaagcaagcagcaggacaaaaagaggcgagagaggagcaaggcgaagaaaagacaaagaagccaacgcagaaggaaaaaaacaagaaagaacgcaaaaccgccaggaaacacagaaccgagcggaccgcacacggaaagaaaaacaaaaaaaacaaaaacaaaacacacacacacacacacacacacacacacacacacacacaaaaaaaccgggggccgaacccagaccagaacagcagcaaagaggaacaaggaacagcagcagaagaaaaccaagaccagagagcaacaaacaagaggaaaggaagcgaaaagaagcacggcagacacagaacaccagggacaagcgacaagggagaaaaaaaggaaacaagcaaaccgccagaaagaaaaggagaaccgcacacaaaaccccacagagaagaaagagccaacccggcaacaccaaaacagcagaaggagaacaaaagagcagagagcgaacaaaaggagagccaagaaagcagcgaagaagaacgaagcaccacgggaaaaggagcaaaagagccagagcgagcagggacaacaagaacgaaaggacagcaaaacacagaacaggggagggaaagggaacaagaaggaagacagaagcgacccggccaagcaagaccgggcgaaggccaccagacaaggccaacccgcccaccaaggggccacaaaacagcaggagccgacaaaacccaaaaaaacaaaaccacgaccgcagagaaacgaaacacgggacacacccaacccggagaaggagacagaaccacagaaacgaaagggaaacaacgcaccagacgcacagacaggacagcagaggccaaacgccaaagagaaggacccaaaaacaacaagcgaaccacagaaacagaagacggcaacagacgagccaaaccggcagaaaaccccacgacaagacagagaaaacaaaggcaaacaaacacaggaggaaaacgaggaaaacaaaaaaagagaaaaggaaaggaaagaaaagagagagcaaggcccgcagagagaaacaggagaacaaacgccggacgagaacagaacaaagggaagaagacaacacaacaagcaaccacccagaaaaaaacaaagaaacacgggacaaagcagagccgcagaaagaaacagccaaccaacaacccaccagaagccaaaaggaaaccaaaacagggggaacaagaacaggccaagccgacagagaagacagacgacccaaagccgacacaggcacagaccagaccccaccacaaaaaagcacaacaagccaaaaaaaaaaaaaaaaa

SEQ ID NO: 167 - DNA, 4455 bp, homo sapiens
gcggccgccgcgccgcgcacccatggacggcccggccatcatcacccaggtgaccaaccccaaggaggacgagggccggttgccgggcgcgggcgagaaagcctcccagtgcaacgtcagcttaaagaagcagaggagccgcagcatccttagctccttcttctgctgcttccgtgattacaatgtggaggcccctccacccagcagccccagtgtgcttccgccactggtggaggagaatggtgggcttcagaagggtgaccagaggcaggtcattcccataccaagtccaccagctaagtaccttcttccagaggtgacggtgcttgactatggaaagaaatgtgtggtcattgatttagatgaaacattggtgcacagttcgtttaagcctattagtaatgctgattttattgttccggttgaaatcgatggaactatacatcaggtgtatgtgctgaagcggccacatgtggacgagttcctccagaggatggggcagctttttgaatgtgtgctctttactgccagcttggccaagtatgcagaccctgtggctgacctcctagaccgctggggtgtgttccgggcccggctcttcagagaatcatgtgtttttcatcgtgggaactacgtgaaggacctgagtcgccttgggcgggagctgagcaaagtgatcattgttgacaattcccctgcctcatacatcttccatcctgagaatgcagtgcctgtgcagtcctggttcgatgacatgacggacacggagctgctggacctcatccccttctttgagggcctgagccgggaggacgacgtgtacagcatgctgcacagactctgcaataggtagccctggcctctgcctgcctcccgcctgtgcactctggaacctctggcctcaggggacctgcctgtcctcagctccctgggagctgaaagtgaggatactccgtgctccaggccacagggtgaatgtggccatgcctacctgttttgtttttttaagaacagaaacaactattttaaaagaactcttttaagaaatttcataaagggacatgcattttactgggtttgcttttcttaaaacataccaaaaaagaaaaaaatagaaaaaaaaaaaaaaaaagcttgatctctatcagacttcctttcaactgtcctcccctccaagcagaccacctgtccccttctatcccagctcagagcagctgacccaactcagaatctctttcctacaggatgaagtgccttttgaatgttattttaagccgagagttaatttttctacacaacatatttccagacatcttttagtcttttattgtcttagatactataagaagatgaacatgacaattttctagaacctggtagcgtgtgtgtgtgtggcggggggtgctgagggaggggagtgagtcacaggagcctgtcccccaacaggtgtgactgctctgacaacctgtggcatgctgcagggtcaggctcctgataggaggatttcatgactatgtcattgtctccactcatttttgacccagtttggaatgtatctgcaattgtgtggctcaacactttaggaaacaatagattattttatattattatttctgatggtgacaagtttgtcttgaggtcacattttctccttgaaaagtgacatcctgtcacttctgctctcacactactgccatacatttgtgttttttgttgttattgtttgggtagagcagttacaagaaaccctaaaacccttggatataaaagaaatctgtttattgatttttaaatctttcctttccaaaagctggatacacatggagctgtttgggaattttccttgctgctaccgcgctgccaccaaatggaattgaccagcggctgttacactgttctttgccactgtgcctatgctcagaatatgctcactgctaagctacaaactcggacagggtcagaaacagaggtgtcccatcccattgcagcctccaccacctgtaaccccttcctggcattggccactgaagggtacaaaggcaaaaggaccacagcaccacttaggtgtagcatggattttaaactgcagtcagtatcagatcctgtttgataaataagctgactgttctctcttgagaacctgtggcctcaaccagccaccaagctgatgtggcccaagtccatctcttggtcttctcctttgaagcacagcctatttctgagccaagggttggggaagcctgtctagatgtgggactcattgccccaaaccagggagaggaagagctcccacagggagagcccaggctctctttgcagcctttcccagtttggtgtttaagcagtgccatgttccttgtttgacaacaagacagtctgtaaagtattgctcttaaaaacaattaaaaagaaccctttcatattggcaccattgccttagtcctctgtgggttggtcttcagccagcattctggtgggagtgactggcattaacaagactggaaatcgggggtcaaagtaaaatatctttgttttgctttcattcacaaagtaatgaagccagctgccaattacatcctcccaacagcactttggtctgtggactgctgtgtgaatattcagaagggaagtaagtattcagggggtaaacaggtctcccagcattctgagtgttccaaaccagtaatccacatgccaattcaaatagaacagccccttgctagatattaccacagataatgacagttacatggtagaactgcccatgccacaaatatttatttggaaaagtagtcattaaatgaacccactgccttaaatgtcttgaatgttgcagtcaagtgtctgtcatgtgttgatatccacacagaattaggccctaatgagagccttagaccctcaaccatgcccccttcgttggcatcacagggccttatttggaagagcgggcaaagaggatggaaatcataaaatatttcatgggaatcgaacctagggatagtgctccacttctgacgatggagtgaagacacttggcagacttgagccagacacttcacctagtagttcctgaaactgtgagcaccactgcactaagccagtgcggagctgttagggacgggcccagctcctgcaccacggacacagaatgtctggagagggccagcaggccctctgagggttctggaatctgtgcaccttatttgaccacactccaaaattctgtttttattttaacccttgaatctgctttatgtacataatcaaaatatctatatctatatctatatctatatctatatatttttaatcatctacatgtaaatgaagcaatagaattctaacataaggccaagaaatgagacgaatgtttggggtttatgttttttaaggtaaatacgggtattgtttttaattattaccatgtattaaattgtgggctttgaaacctaatgaaacctgttagccacttctctgtgccatatacttcccatgttaccaaaatacccccaactctttagccaaaagagaaccctgacctcctgagtttccatgctcctttctgtaccaggtttaaatgtagtcttctggagaagtatttttgacattgagctctgggacaggacaccttgggtttgtggactgcagcccactatgatgttattacttctctggccaggcctccagtggaagtgcacaggcactcccaatgttgttaatgctctgtcttccatttgttctggaatcctacgtgttggtctgtggttccatgcattagctgtttgtaaataatgcatttgcatactgaaaaaggaatgccacctgccacagttgatggtgaggaagctcctttgacgtggtgcaattttgatgagatgtctctggggacacgaggatgccctaatgatgctgacttgtcatggttgcagcatttgaacttttggtgttaaaaaaaaaaacctgtaagtctgtaacctggcaacattttacaaccctgtatttttaaagatggctttctaataaaaaatccagaaccacacagccctatggtcaaacaatcctacgtttgtgcctctgcttttaaaggtgctgtgctggacagttggcatgccagggttcgagaagagtgaatggcttgacgtacttgcagttaactgtgcaaaattggctggctgcctctgttcctactgtactgtaactttgatcatgtctgttcctgttccattctcccaggagcttctctgcagactgacacaccctcccccaccccgggtagtggagatgctggtgtctgggtagtcatggatttctgctggacatttgaatgtgataaacaatccagcattacttaggaaatgctacatgcggaatgtgcacgtttccaggggcgagtattgtcaatcaaaaggtttgcaatgatttccttcctgccaaaaataaacatgtgaaactgca

SEQ ID NO: 168 - protein, 276 aa, homo sapiens
MDGPAIITQVTNPKEDEGRLPGAGEKASQCNVSLKKQRSRSILSSFFCCFRDYNVEAPPPSSPSVLPPLVEENGGLQKGDQRQVIPIPSPPAKYLLPEVTVLDYGKKCVVIDLDETLVHSSFKPISNADFIVPVEIDGTIHQVYVLKRPHVDEFLQRMGQLFECVLFTASLAKYADPVADLLDRWGVFRARLFRESCVFHRGNYVKDLSRLGRELSKVIIVDNSPASYIFHPENAVPVQSWFDDMTDTELLDLIPFFEGLSREDDVYSMLHRLCNR

SEQ ID NO: 169 - DNA, 3571 bp, homo sapiens
gcggggctgaccaggccggtcccccgggaacaggaaccctggtggacgggtcccagcaggcttcttcggtgcccgagagggagcgggtgcccaagggggtggtccctgtggcaggtcccggggtgggggcgcggcgctccgggaagagccttccgcaggtccccgccccgtcacgtgggcgccggccccggccgctgcggtcggtccgctggttggtcgggcgcttggtccggcagttggtcggtgggccagtggcccgtcgctcgcttctgggctctcatgtttgaaggtgggagggacacgggagcggcccgcacacctgagccgcccggagaggagcctcggccccgtacccagtaagaagaggaggaggccaggcaggcaaaaggagtcatggcttctgatgctagtcatgcgctggaagctgccctggagcaaatggacgggatcattgcaggcactaaaacaggtgcagatcttagtgatggtacttgtgagcctggactggcttccccggcctcctacatgaaccccttcccggtgctccatctcatcgaggacttgaggctggccttggagatgctggagcttcctcaggagagagcagccctcctgagccagatccctggcccaacagctgcctacataaaggaatggtttgaagagagcttgtcccaggtaaaccaccacagtgctgctagtaatgaaacctaccaggaacgcttggcacgtctagaaggggataaggagtccctcatattgcaggtgagtgtcctcacagaccaagtagaagcccagggagaaaagattcgagacctggaagtgtgtctggaaggacaccaggtgaaactcaatgctgctgaagagatgcttcaacaggagctgctaagccgcacatctcttgagacccagaagctcgatctgatgactgaagtgtctgagctgaagctcaagctggttggcatggagaaggagcagagagagcaggaggagaagcagagaaaagcagaggagttactgcaagagctcaggcacctcaaaatcaaagtggaagagttggaaaatgaaaggaatcagtatgaatggaagctaaaggccactaaggctgaagtcgcccagctgcaagaacaggtggccctgaaagatgcagaaattgagcgtctgcacagccagctctcccggacagcagctctccacagtgagagtcacacagagagagaccaagaaattcaacgtctgaaaatggggatggaaactttgctgcttgccaatgaagataaggaccgtcggatagaggagcttacggggctgttaaaccagtaccggaaggtaaaggagattgtgatggtcactcaagggccttcggagagaactctctcaatcaatgaagaagaaccggagggaggtttcagcaagtggaacgctacaaataaggaccctgaagaattatttaaacaagagatgcctccaagatgtagctctcctacagtggggccacctccattgccacagaaatcactggaaaccagggctcagaaaaagctctcttgtagtctagaagacttgagaagtgaatctgtggataagtgtatggatgggaaccagcccttcccggtgttagaacccaaggacagccctttcttggcggagcacaaatatcccactttacctgggaagctttcaggagccacgcccaatggagaggctgccaaatctcctcccaccatctgccagcctgacgccacggggagcagcctgctgaggctgagagacacagaaagtggctgggacgacactgctgtggtcaatgacctctcatccacatcatcgggcactgaatcaggtcctcagtctcctctgacaccagatggtaaacggaatcccaaaggcattaagaagttctggggaaaaatccgaagaactcagtcaggaaatttctacactgacacgctggggatggcagagtttcgacgaggtgggctccgggcaaccgcagggccaagactctctaggaccagggactccaagggacagaaaagtgacgccaatgccccctttgcccagtggagcacagagcgtgtgtgtgcatggctggaggactttggcctggctcagtatgtgatctttgccaggcagtgggtatcttctggccacaccttattgacagccacccctcaggacatggaaaaggagctaggaattaagcacccactccacaggaagaagcttgttttagcagtgaaagccatcaacaccaaacaggaggagaagtctgcactgctagaccacatttgggtgacaaggtggcttgatgatattggcttaccccagtacaaagaccagtttcatgaatctagagttgacggacgaatgctgcaatacctaactgtgaacgatttactcttcttaaaagtcaccagccaactacatcatctcagcatcaaatgtgccattcacgtgctgcatgtcaacaagttcaacccccactgcctgcaccggcggccagctgatgagagtaacctttctccttcagaagttgtacagtggtccaaccacagggtgatggagtggttacgatctgtggacctggcagagtatgcacccaatcttcgagggagtggagtccatggaggcctcattatcctggagccacgcttcactggggacaccctggctatgcttctcaacatccccccacaaaagacgctcctcaggcgccacctgaccaccaagttcaatgccttgattggtccggaggctgaacaggagaagcgagagaaaatggcctcaccagcttacacaccactgaccaccacagccaaagtccggccaaggaaactaggattttcacacttcggaaacataagaaaaaagaagttcgatgaatcgacggactacatttgcccaatggagcccagtgacggtgtcagtgatagtcacagggtctacagtggctaccggggcctcagcccccttgatgcccctgaactggatgggctggaccaggtgggacagattagctgatgcccttgtcacctgccctctgtgcaccctgagagctcacagtaacactgtgtgtgtcaccatataactgcacctcacccccgcacgtgtgcatgactcgcagagaatattccagcaattgtgtacccctgggccagtctctttgaaccctgagggtggccaggatctggagctgcatctctaaggggccaggctttggggaccattgccaaaggtggactcaggaggaaagacacttaaagacacttttacatgtctagtaattcttgatgttcatcttcagcaccagtggaaacacatgaacttcgatgcaggtccagagaccatggacactcccacgaggctcagctctcaggcaccccctacacttcagttgagggaaaagctcaagtgccttaggcccgtggaccacagtcttggctgagatcaaagggatgagcaacagggacttctgccacagtgacaatggaattgtgttgtgccttacttcagaggtggtctcttctttcttgtaataaaagcaatatttatgcggaaagcaagcagc

SEQ ID NO: 170 - protein, 876 aa, homo sapiens
MASDASHALEAALEQMDGIIAGTKTGADLSDGTCEPGLASPASYMNPFPVLHLIEDLRLALEMLELPQERAALLSQIPGPTAAYIKEWFEESLSQVNHHSAASNETYQERLARLEGDKESLILQVSVLTDQVEAQGEKIRDLEVCLEGHQVKLNAAEEMLQQELLSRTSLETQKLDLMTEVSELKLKLVGMEKEQREQEEKQRKAEELLQELRHLKIKVEELENERNQYEWKLKATKAEVAQLQEQVALKDAEIERLHSQLSRTAALHSESHTERDQEIQRLKMGMETLLLANEDKDRRIEELTGLLNQYRKVKEIVMVTQGPSERTLSINEEEPEGGFSKWNATNKDPEELFKQEMPPRCSSPTVGPPPLPQKSLETRAQKKLSCSLEDLRSESVDKCMDGNQPFPVLEPKDSPFLAEHKYPTLPGKLSGATPNGEAAKSPPTICQPDATGSSLLRLRDTESGWDDTAVVNDLSSTSSGTESGPQSPLTPDGKRNPKGIKKFWGKIRRTQSGNFYTDTLGMAEFRRGGLRATAGPRLSRTRDSKGQKSDANAPFAQWSTERVCAWLEDFGLAQYVIFARQWVSSGHTLLTATPQDMEKELGIKHPLHRKKLVLAVKAINTKQEEKSALLDHIWVTRWLDDIGLPQYKDQFHESRVDGRMLQYLTVNDLLFLKVTSQLHHLSIKCAIHVLHVNKFNPHCLHRRPADESNLSPSEVVQWSNHRVMEWLRSVDLAEYAPNLRGSGVHGGLIILEPRFTGDTLAMLLNIPPQKTLLRRHLTTKFNALIGPEAEQEKREKMASPAYTPLTTTAKVRPRKLGFSHFGNIRKKKFDESTDYICPMEPSDGVSDSHRVYSGYRGLSPLDAPELDGLDQVGQIS

SEQ ID NO: 171 - DNA, 3258 bp, homo sapiens
ctgtattgtggttcctggaacacttcagaggcttgtgattctactgcttcttattcacactataatacatgtctcaccaatagatgattcaagaacatcatttaaatacacaatttttcattctctatttttgctaaatttcttcatactcaactttcagattctttaatctccagctcagcttcaacaattcaacgctgttctttctgaaaaagtacacatcgtgccttctctacttcgctcttggaacataatttctcatggcagtgtttaagaccactctgtggaggttaatttctgggaccttagggataatatgcctttcgttgatggctacgttgggaattttgttgaaaaattcttttactaaactgagtattgagccagcatttactccaggacccaacatagaactccagaaagactctgactgctgttcttgccaagaaaaatgggttgggtaccggtgcaactgttacttcatttccagtgaacagaaaacttggaacgaaagtcggcatctctgtgcttctcagaaatccagcctgcttcagcttcaaaacacagatgaactggattttatgagctccagtcaacaattttactggattggactctcttacagtgaggagcacaccgcctggttgtgggagaatggctctgcactctcccagtatctatttccatcatttgaaacttttaatacaaagaactgcatagcgtataatccaaatggaaatgctttagatgaatcctgtgaagataaaaatcgttatatctgtaagcaacagctcatttaaatgtttcttggggcagagaaggtggagagtaaagacccaacattactaacaatgatacagttgcatgttatattattactaattgtctacttctggagtctataaaatgtttttaaacagtgtcatatacaattgtcatgtatgtgaaacaatgtgttttaaaattgatgaaattcgttcacctacatttgagaattataaaattaacataaagaattttgtattttcatttaatgtatatatttaatgttaaattcaatgtagttttattacacatttatgtaattttatttacattcttgctaattctcagcagaaatttaaataagatttaattcacatcaaataaaatttagaaaataaaatttaactcacactgcccaggctggagcatagtggcaagatcatagctcattgcaagctcaagtgatcctcctgactcagcctcccaagtagctaggactgcaggcaccatgtcactatgcccgactaatttttaatttttaattttttgtcaagacaaggtcttgctatgttgcccaggctggtcttgaactcctggcctcaagggattctcccaccttggattcccaaagtgctgggattataggtgtgaaccaccatccctggccctcttcacattcttgtatgaagattgatttgggaaaaatgcatttcaggtaactgacaaaagatataggatgaaaaataatatctttcaaatgtttaatttgaactaagagagcttatgcattgcactttctggagatttgtaatgttttggttttgttgtccatgtgactacaaaataatatattttttaattaaaaaatttaaaataatacaggcaagcatgtaatgattatcaatatttttttccaccaactatcctatacccctgacctcctttcattaggcattatcttctgttttgattttaacacttagagtggttttctctgttatgaatcaaagctgatctattttcatcatttttgtgatgaaaaaattaattttgattgacttaggatggaaggatttggactgggtgtggtggtttatgcctgtaatcgcagcactttgggaggccaaggcgggtggatcacttgaggtcaggagtttgagaccagcctggccaacatggtgaaaccctgtctctactaaaaatacaaaaattggctgggtgtggtagtgcacacctgtaatcccagctatttgggaggctgagtcgagaggatcgcttgaacctaggaggtggaggttgcagtgagtcgagattgcaccactgcactccagcctgggtgacagagccagactcctctccaaaaaaaaaaaaaaaaaaaaaagatgaaaggatttggaaccttaattgcatctgaaaaactgcctcacctttgttatttagtgtactccaaccacggagtaacatcccatcataatcccaaatcctactcaaacaaaaggggaagggattatgcaggtgtacactaggccactggtgtaccaattagaaaccactttagagttatgcctactgtacccacataatcctaaaaatatgttacaactgctacttcatagtttatgccacttattttattttttacttttattatttttttttctgagacacggtttcattcccattgcccaggctgtagtgcaatgatgcaatcatggttcactgcagcttcaacttcccaggctcaagggatcctcccacctcagccttctgagtacttgggactcaggtgcgagccatcatgctcagctaattttttgtatcatttgtagaaatggggttttgtattgttgcccaggctgatcttgaactcctggggtcaaggattctgcccgccttggcctcctaaagggctggaattacaggcataagccactgtgcccggccagtttatataatttaaacactgccttttggttccttgattcccatatgctaggacaagtaattattattttattttattttactttaagttctgggttacatgtgcagaacctgcaggtttgttacataggtatacatgttccaaggtggtttgctgcacctattgacccatcatctaggttttaagtcccacatgcattaggtatttgtcctaatgctcttcctccccttgccccccaccccccgacaggccttggtctgtgatgttcacctccctgtgtccatgtgttctcattgttcaactcccacttattagtaagaacatgtggtgtttggttttctgttcctgtgttagtttgctgagaatgatggtttccagcttcatccatgtcgctgcaaaggacatgaactcattctttttatggctgcatagtattccatggtgtatatgtgccatattttctttatccagtctatcactgatgggcatttgggttggttccaagtctttgctatggtaaatagtgctgcaataaacatacgtgtgca

SEQ ID NO: 172 - protein, 179 aa, homo sapiens
MAVFKTTLWRLISGTLGIICLSLMATLGILLKNSFTKLSIEPAFTPGPNIELQKDSDCCSCQEKWVGYRCNCYFISSEQKTWNESRHLCASQKSSLLQLQNTDELDFMSSSQQFYWIGLSYSEEHTAWLWENGSALSQYLFPSFETFNTKNCIAYNPNGNALDESCEDKNRYICKQQLI

SEQ ID NO: 173 - DNA, 3690 bp, homo sapiens
aatcggtccaattctcggccgggaagtctctggccgggacggggcagggcgaacctgccagtgactggactcagcttctttgcgtaaccaatactggaaggcatttaaaggcacctctgccgccacagaccttgcagttaactccgccctgacccacccttcccgatgcagtccctgatgcaggctcccctcctgatcgccctgggcttgcttctcgcggcccctgcgcaagcccacctgaaaaagccatcccagctcagtagcttttcctgggataactgtgatgaagggaaggaccctgcggtgatcagaagcctgactctggagcctgaccccatcatcgttcctggaaatgtgaccctcagtgtcatgggcagcaccagtgtccccctgagttctcctctgaaggtggatttagttttggagaaggaggtggctggcctctggatcaagatcccatgcacagactacattggcagctgtacctttgaacacttctgtgatgtgcttgacatgttaattcctactggggagccctgcccagagcccctgcgtacctatgggcttccttgccactgtcccttcaaagaaggaacctactcactgcccaagagcgaattcgttgtgcctgacctggagctgcccagttggctcaccaccgggaactaccgcatagagagcgtcctgagcagcagtgggaagcgtctgggctgcatcaagatcgctgcctctctaaagggcatataacatggcatctgccacagcagaatggagcggtgtgaggaaggtcccttttcctctgttttgtgtttgccaaggccaaactcccactctctgcccccctttaatcccctttctacagtgagtccactaccctcactgaaaatcattttgtaccacttacattttaggctggggcaagcagccctgacctaagggagaatgagttggacagttcttgatagcccagggcatctgctgggctgaccacgttactcatccccgttaacattctctctaaagagcctcgttcatttccaaagcagttaaggaatgggaaccagagtgttttaggacctgaagaatctttatgactctctctctttcactcttttttttttttgtcactaagttaaaagcgaagtgagagtattaacgtttttgttctcctccggccccctgttacaatgaaggggcaaaagtatttgctcttagtctattcctcccttaacttctgtgactaatttttatttcctttctagatttgcccaattaatactagggtgcagtgtatcctggagaggtagggtgtgtgggggaggaatcccttgggggagatattaggagtgctctgttgtttacaaactcaggtacccgcagggcctagcaagagacttaaatgactgataagaaccgtgagaaacatgttgcttccaggcttgatttcgatttttcgctttttttttttttgagacagaatctcactttgtcaccaggctggagtgcagtggtgcaatctcacctcactgcaacctccgcctcctgggttcaagcaattctcctgcctcagcctcccaagtagcttggactacaggccctgccaccacgcccggctaatttgtgtatttttagtagagatggggtttcaccatgttggccaggatggtctcgatctcttgacctcgtgatctgtccaccttggccttgcaaagcgctggattacaggcatgagccactacacccagccgatttttcctttttgattaaagatgctattacaatgtaaatatttcttacacagaaagtcacagcacatgtgcccattgatacaaggctgctgaggcctggtctccagttggaaatataattaagggtggcaaggactggagtcagttggagagtgcatagccagtctgtgaagacaactgccagatactggcaatactccagcctggtgacagagtgagactctgtctcaaaaaaaaagtttcaatgtttactcctagagaagccaaaaatccagatttgtatatgaaatcttaccattttaaaagattggcagctaattatttttttaaaaagctgtgcagtgtgatgtgtcccaaacggactggctcatgggtggccacgtcacaacctctgatctcagaccgtgcatgccttgtcctcttaagacaactcctgtggcaccgtttctccctccacagggccaaagccatagtgtccggtcccaaggacaaggctcttccagtgctaggagaggtatgagcagcctctcacctgtgagctgtggggatcacaaggctgcctgcctcagtcttggagtcctgttgggtgaatgaggcagatgggaaagagcctcaccagcagctgcttttggagcaggggtccaaggaagagagggtggcctcgacatcaaactgcctggatttttctaccaccctgttacatcataacaacttctgaaacacacaccagccctgagttctgggctcatttgaagcctggaatagcaataaatctttttaacttgcggacagtttccccttgccttggctgcatatttcactgatcacatctcaggatttcaaaagcatttttggggtggggctcttttggttggaagggtttgttggaacggtacaggtgagccgaggtgattccagggacggacccttctgcaggagcttgagcttgcttgttgtctctgcttcatcgccatccagctcccttgtttgctattttgctttccatcacatcatgactgcggagagcaaaaatcacctagtgaccattgaacaggtcccagagacaaaatctttttatctgaggaatttaaaagggagcaaagaccacctggtgactatcaggccatgcagaggcaaaacgccttatttggggaaaattaaaagtaattagactttcctattatctaaagcaggcatctggttccagatttcttttccccgaaaaaaaccttagaagtaactaaaatttctgtacatctccggaatgccatgctgaaactcactgcaaccccacggtcccgctttaaggtccataaatatccctaaggaaaaatccaccgtggtacattcagtcctctcaccgaggtgccccatggcagtcttctgcagcattcttctaatacctttcctttttcaaacctatactgttgttggtgaattctttttaccaacccacgagttgaccacttcccaatgccggggatctgacacctcacctggcaatgacctccacagccgtttccctctgttggatcttccagccttattctcaacagttcatttttagttcacattcttgaccgaatctcagtagctcagttaatctttttatgtctgctctgctcttgggtcatatgttccgtgaggtttcttaggggtgggggatgaggagttaaaggtggcatcttcaatcgcaggtcaaagcagactttaataaatggtgctgagccaactggaaagccccttggagaaagttgaagttagacctgtacttcacaccatatgcaagaatgaactccatctggatccaggatccaaatgtaagaaaatgaagccatataaatacagaaggaaacgtggtggaaatatccagtggcaacaaaatattgacacatttgactacatgaagataataaaaatgcttagtaaaaacacaataaaa

SEQ ID NO: 174 - protein, 193 aa, homo sapiens
MQSLMQAPLLIALGLLLAAPAQAHLKKPSQLSSFSWDNCDEGKDPAVIRSLTLEPDPIIVPGNVTLSVMGSTSVPLSSPLKVDLVLEKEVAGLWIKIPCTDYIGSCTFEHFCDVLDMLIPTGEPCPEPLRTYGLPCHCPFKEGTYSLPKSEFVVPDLELPSWLTTGNYRIESVLSSSGKRLGCIKIAASLKGI

SEQ ID NO: 175 - DNA, 6041 bp, homo sapiens
caatcccacagagtattgatgaggaaactgaagtttggagcgatcacatcattttcccaaggtaacacaagtggcaagacagccgggaacccctaccccatccccttattcagcacatgaaataaacaaggggcatccaaatcttgcggcaacgcccccgggacatgcatcgtcccctggactctctcaaaccccttatccctctggacagaatgcaggtccaaccacgctggtataccctcaaacccctcagacaatgaattcacaacctcaaacccgttctccgtttttccagaggcctcaaatacagcctcctagagctaccatcccgaacagcagtccttccattcgtcctggtgcacagacacccactgcagtgtaccaggctaatcagcacatcatgatggttaaccatctgcccatgccgtacccagtgccccaggggcctcagtactgtataccacagtaccgtcatagtggccctccttatgttgggcccccccaacaatatccagttcaaccaccggggccaggtcctttttatcctggaccaggacctggggacttccccaatgcttatggaacgcctttttacccaagtcagccggtgtatcagtcagcacctatcatagtgcctacgcagcaacagccgcctccagccaagagagagaaaaaaactataagaattcgggatccaaaccagggaggtaaagacataacagaggagattatgtctggaggtggcagcagaaatcctactccacccataggaagacccacgtccacacctactcctcctcagcagctgcccagccaggtccccgagcacagccctgtggtttatgggactgtggagagcgctcatcttgctgccagcacccctgtcactgcagctagcgaccagaagcaagaggagaagccaaaaccagatccagtgttaaagtctccttccccagtccttaggctagtcctcagtggagagaagaaagaacaagaaggccagacatctgaaactactgcaatagtatccatagcagagcttcctctgcctccatcacctaccactgtttcttctgttgctcgaagtacaattgcagcccccacctcttctgctcttagtagccaaccaatattcaccactgctatagatgacagatgtgaactctcatccccaagagaagacacaattcctatacccagcctcacatcttgcacagaaacatcagaccctttaccaacaaatgaaaatgatgatgatatatgcaagaaaccctgtagtgtagcacctaatgatattccactggtttctagtactaacctaattaatgaaataaatggagttagcgaaaaattatcagccacggagagcattgtggaaatagtaaaacaggaagtattgccattgactcttgaattggagattctcgaaaatcccccagaagaaatgaaactggagtgtatcccagctcccatcaccccttccacagttccttcctttcctccaactcctccaactcctccagcttctcctcctcacactccagtcattgttcctgctgctgccactactgttagttctccgagtgctgccatcacagtccagagagtcctagaggaggacgagagcataagaacttgccttagtgaagatgcaaaagagattcagaacaaaatagaggtagaagcagatgggcaaacagaagagattttggattctcaaaacttaaattcaagaaggagccctgtcccagctcaaatagctataactgtaccaaagacatggaagaaaccaaaagatcggacccgaaccactgaagagatgttagaggcagaattggagcttaaagctgaagaggagctttccattgacaaagtacttgaatctgaacaagataaaatgagccaggggtttcatcctgaaagagacccctctgacctaaaaaaagtgaaagctgtggaagaaaatggagaagaagctgagccagtacgtaatggtgctgagagtgtttctgagggtgaaggaatagatgctaattcaggctccacagatagttctggtgatggggttacatttccatttaaaccagaatcctggaagcctactgatactgaaggtaagaagcagtatgacagggagtttctgctggacttccagttcatgcctgcctgtatacaaaaaccagagggcctgcctcctatcagtgatgtggttcttgacaagatcaaccaacccaaattgccaatgcgaactctggatcctcgaattttgcctcgaggaccagactttacaccagcctttgctgattttggaaggcagacacctggtggaagaggcgtacctttgttgaatgttgggtcacgaagatctcaacctggccaaagaagagaacccagaaagatcatcacagtttctgtaaaagaagatgtacacctgaaaaaggcagaaaatgcctggaagccaagccaaaaacgagacagccaagccgatgatcccgaaaacattaaaacccaggagctttttagaaaagttcgaagtatcttaaataaattgacaccacagatgttcaatcaactgatgaagcaagtgtcaggacttactgttgacacagaggagcggctgaaaggagttattgacctggtctttgagaaggctattgatgaacccagtttctctgtggcttacgcaaacatgtgtcgatgtctagtaacgctgaaagtacccatggcagacaagcctggtaacacagtgaatttccggaagctgctactgaaccgttgccagaaggagtttgaaaaagataaagcagatgatgatgtctttgagaagaagcagaaagaacttgaggctgccagtgctccagaggagaggacaaggcttcatgatgaactggaagaagccaaggacaaagcccggcggagatccattggcaacatcaagtttattggagaactctttaaactcaaaatgctgactgaagccatcatgcatgactgtgtggtgaagctgctaaagaaccatgatgaagaatccctggagtgcctgtgtcgcctgctcaccaccattggcaaagacttggactttgaaaaagcaaagccacgtatggaccagtactttaatcagatggagaaaattgtgaaagaaagaaaaacctcatctaggattcggttcatgcttcaagatgttatagacctaaggctgtgcaattgggtatctcgaagagcagatcaagggcctaaaactatcgaacagattcacaaagaggctaaaatagaagaacaagaagagcaaaggaaggtccagcaactcatgaccaaagagaagagaagaccaggtgtccagagagtggacgaaggtgggtggaacactgtacaaggggccaagaacagtcgggtactggacccctcaaaattcctaaaaatcactaagcctacaattgatgaaaaaattcagctggtacctaaagcacagctaggcagctggggaaaaggcagcagtggtggagcaaaggcaagtgagactgatgccttacggtcaagtgcttccagtttaaacagattctctgccctgcaacctccagcaccctcagggtccacgccatccacgcctgtagagtttgattcccgaaggaccttaactagtcgtggaagtatgggcagggagaagaatgacaagccccttccatctgcaacagctcggccaaatactttcatgaggggtggcagcagtaaagacctgctagacaatcagtctcaagaagagcagcggagagagatgctggagaccgtgaagcagctcacaggaggtgtggatgtggagaggaacagcactgaggctgagcgaaataaaacaagggagtcagcaaaaccagaaatttcagcaatgtcagctcatgacaaggctgcattatcagaagaggaactggagaggaagtcgaaatctatcattgatgaatttctacacattaatgattttaaggaagccatgcagtgtgtggaagagctgaatgcccagggcctactacatgtttttgtgagagtgggagtggagtccaccctggaaaggagccagatcaccagggatcacatgggccaattactctatcagctggtacagtcagaaaaactcagcaaacaggactttttcaaaggtttttcagaaactttggaattggcagatgacatggccattgatattccccatatttggttgtaccttgctgaactggtgacccccatgttaaaagaaggtggaatctccatgagagaacttaccatagaatttagcaaacctttacttcctgttggaagagctggggtcttgctatctgaaatattgcacctactatgcaaacaaatgagccataagaaagtgggagccttatggagggaggctgacctcagctggaaggactttttaccagaaggagaagatgtacataattttcttttggagcagaagttggacttcatagagtctgacagtccctgttcctctgaagcactttcaaagaaagaactgtctgccgaagagctgtataagcgactcgagaaactcattattgaggacaaagcgaatgatgaacagatctttgactgggtagaggctaatctagacgaaatccagatgagttcacctacattccttagagctttaatgactgctgtttgtaaagcagctattatagccgactcttctaccttcagagtggacactgctgttatcaagcagagagtgccgatcttactcaagtacctagactcagatacagagaaggaactgcaagcactttatgcactacaagcatcgatagtaaaacttgatcaacctgccaatttgctgcggatgttttttgattgtctatatgacgaggaggtgatctccgaggatgccttctacaaatgggagagcagcaaggaccctgcagagcagaatgggaagggcgtggctctgaaatctgtcacggcattcttcacgtggctgcgggaagcagaagaggagtctgaggataactaaaacttcaaatacacaaaatgaaacaaaagaaacaatttaagtatttttttaaaaagtttcacgtcttcgccaatcacagtgcagcaaggccaattctcgcagaaacccccacgtgtgcacgagtgggagaggggaaagagaaaaaaaggtgatcatggaggaaaaaggtactggataaaagtaaacttcaaaccttagggcgggagcactaaaaccaaaatacatgtattatttatagaaaatattttctgttttaatcttttctttttaaacaaggactcatacttaaaaaaatgtttagcaaaaaaaaaaaaagttgagaacttttaatttattttaaggactgcaaatgccagtgtaattttttaatttgcagtttctgtaaacaacttgtataatagaaaagcagagaaataaatttccctccccttcaagatgcacctcatgtttgttttaaggtatagcatttagtccagatttgagaaagtttggggtgaacaaggtaagaaagatttttttttttttggcatcaaatctttctgcctgcctctcagcttgcttcagaaaatttaaaaaatcacaatagtaatcaaaacatacataacattgaaacagaaggaaatgctgtggaccacagaactccaagaattgtttaaaaaaaaaaaagtgctaccctgagaaaagtactcttaatactcttgaaatctttagagcaactttaaggcttgtaaatacatagaacaaatatttaaaaaaacaaaaagaaattgactcagtactatttcttttcactttgaaaatataaagaacaaaataaagacaaacattgcaagtttaaaagaaagtaaagtgacttctcctttggacagctgctgcatgtgtgcccattcctgggggtgctgtctggctatttattgtctaattcaaatcactcctgaggggagagagataaaacgagagagagtgagagagtgtgtgtatgtgcgtgtatgcgcacgtatgtgcatgcacatgtatgtatgtatat

SEQ ID NO: 176 - protein, 1585 aa, homo sapiens
MNSQPQTRSPFFQRPQIQPPRATIPNSSPSIRPGAQTPTAVYQANQHIMMVNHLPMPYPVPQGPQYCIPQYRHSGPPYVGPPQQYPVQPPGPGPFYPGPGPGDFPNAYGTPFYPSQPVYQSAPIIVPTQQQPPPAKREKKTIRIRDPNQGGKDITEEIMSGGGSRNPTPPIGRPTSTPTPPQQLPSQVPEHSPVVYGTVESAHLAASTPVTAASDQKQEEKPKPDPVLKSPSPVLRLVLSGEKKEQEGQTSETTAIVSIAELPLPPSPTTVSSVARSTIAAPTSSALSSQPIFTTAIDDRCELSSPREDTIPIPSLTSCTETSDPLPTNENDDDICKKPCSVAPNDIPLVSSTNLINEINGVSEKLSATESIVEIVKQEVLPLTLELEILENPPEEMKLECIPAPITPSTVPSFPPTPPTPPASPPHTPVIVPAAATTVSSPSAAITVQRVLEEDESIRTCLSEDAKEIQNKIEVEADGQTEEILDSQNLNSRRSPVPAQIAITVPKTWKKPKDRTRTTEEMLEAELELKAEEELSIDKVLESEQDKMSQGFHPERDPSDLKKVKAVEENGEEAEPVRNGAESVSEGEGIDANSGSTDSSGDGVTFPFKPESWKPTDTEGKKQYDREFLLDFQFMPACIQKPEGLPPISDVVLDKINQPKLPMRTLDPRILPRGPDFTPAFADFGRQTPGGRGVPLLNVGSRRSQPGQRREPRKIITVSVKEDVHLKKAENAWKPSQKRDSQADDPENIKTQELFRKVRSILNKLTPQMFNQLMKQVSGLTVDTEERLKGVIDLVFEKAIDEPSFSVAYANMCRCLVTLKVPMADKPGNTVNFRKLLLNRCQKEFEKDKADDDVFEKKQKELEAASAPEERTRLHDELEEAKDKARRRSIGNIKFIGELFKLKMLTEAIMHDCVVKLLKNHDEESLECLCRLLTTIGKDLDFEKAKPRMDQYFNQMEKIVKERKTSSRIRFMLQDVIDLRLCNWVSRRADQGPKTIEQIHKEAKIEEQEEQRKVQQLMTKEKRRPGVQRVDEGGWNTVQGAKNSRVLDPSKFLKITKPTIDEKIQLVPKAQLGSWGKGSSGGAKASETDALRSSASSLNRFSALQPPAPSGSTPSTPVEFDSRRTLTSRGSMGREKNDKPLPSATARPNTFMRGGSSKDLLDNQSQEEQRREMLETVKQLTGGVDVERNSTEAERNKTRESAKPEISAMSAHDKAALSEEELERKSKSIIDEFLHINDFKEAMQCVEELNAQGLLHVFVRVGVESTLERSQITRDHMGQLLYQLVQSEKLSKQDFFKGFSETLELADDMAIDIPHIWLYLAELVTPMLKEGGISMRELTIEFSKPLLPVGRAGVLLSEILHLLCKQMSHKKVGALWREADLSWKDFLPEGEDVHNFLLEQKLDFIESDSPCSSEALSKKELSAEELYKRLEKLIIEDKANDEQIFDWVEANLDEIQMSSPTFLRALMTAVCKAAIIADSSTFRVDTAVIKQRVPILLKYLDSDTEKELQALYALQASIVKLDQPANLLRMFFDCLYDEEVISEDAFYKWESSKDPAEQNGKGVALKSVTAFFTWLREAEEESEDN

SEQ ID NO: 177 - DNA, 4363 bp, homo sapiens
gcaggctgctggagaaggcgcacctgctgcaggtgctcccggccgccccggaccagcgagcgcgggcactgcggcggggaggatgctgcgcgagcggaccgtgcggctgcagtacgggagccgcgtggaggcggtgtacgtgctgggcacctacctctggaccgatgtctacagcgcggccccagccggggcccaaaccttcagcctgaagcactcggaacacgtgtgggtggaggtggtgcgtgatggggaggctgaggaggtggccaccaatggcaagcagcgctggcttctctcgcccagcaccaccctgcgggtcaccatgagccaggcgagcaccgaggccagcagtgacaaggtcaccgtcaactactatgacgaggaagggagcattcccatcgaccaggcggggctcttcctcacagccattgagatctccctggatgtggacgcagaccgggatggtgtggtggagaagaacaacccaaagaaggcatcctggacctggggccccgagggccagggggccatcctgctggtgaactgtgaccgagagacaccctggttgcccaaggaggactgccgtgatgagaaggtctacagcaaggaagatctcaaggacatgtcccagatgatcctgcggaccaaaggccccgaccgcctccccgccggatacgagatagttctgtacatttccatgtcagactcagacaaagtgggcgtgttctacgtggagaacccgttcttcggccaacgctatatccacatcctgggccggcggaagctctaccatgtggtcaagtacacgggtggctccgcggagctgctgttcttcgtggaaggcctctgtttccccgacgagggcttctcaggcctggtctccatccatgtcagcctgctggagtacatggcccaggacattcccctgactcccatcttcacggacaccgtgatattccggattgctccgtggatcatgacccccaacatcctgcctcccgtgtcggtgtttgtgtgctgcatgaaggataattacctgttcctgaaagaggtgaagaaccttgtggagaaaaccaactgtgagctgaaggtctgcttccagtacctaaaccgaggcgatcgctggatccaggatgaaattgagtttggctacatcgaggccccccataaaggcttccccgtggtgctggactctccccgagatggaaacctaaaggacttccctgtgaaggagctcctgggcccagattttggctacgtgacccgggagcccctctttgagtctgtcaccagccttgactcatttggaaacctggaggtcagtcccccagtgaccgtgaacggcaagacatacccgcttggccgcatcctcatcgggagcagctttcctctgtctggtggtcggaggatgaccaaggtggtgcgtgacttcctgaaggcccagcaggtgcaggcgcccgtggagctctactcagactggctgactgtgggccacgtggatgagttcatgtcctttgtccccatccccggcacaaagaaattcctgctactcatggccagcacctcggcctgctacaagctcttccgagagaagcagaaggacggccatggagaggccatcatgttcaaaggcttgggtgggatgagcagcaagcgaatcaccatcaacaagattctgtccaacgagagccttgtgcaggagaacctgtacttccagcgctgcctagactggaaccgtgacatcctcaagaaggagctgggactgacagagcaggacatcattgacctgcccgctctgttcaagatggacgaggaccaccgtgccagagccttcttcccaaacatggtgaacatgatcgtgctggacaaggacctgggcatccccaagccattcgggccacaggttgaggaggaatgctgcctggagatgcacgtgcgtggcctcctggagcccctgggcctcgaatgcaccttcatcgacgacatttctgcctaccacaaatttctgggggaagtccactgtggcaccaacgtccgcaggaagcccttcaccttcaagtggtggcacatggtgccctgacctgccaggggccctggcgtttgcctccttcgcttagttctccagaccctccctcacacgcccagagccttctgctgacatggactggacagccccgctgggagacctttgggacgtggggtggaatttggggtatctgtgccttgccctccctgagaggggcctcagtgtcctctgaagccatccccagtgagcctcgactctgtccctgctgaaaatagctgggccagtgtctctgtagccctgacataaggaacagaacacaacaaaacacagcaaaccatgtgcccaaactgctccccaaagaattttgagtctctaatctgacactgaatgaggggagaagggaaggagattctgggattgccagttcttccagcagccatgctctgaaaatcaaggtagaatccatggaaagggaccccaggaccccgggaccctagacgtatcttgaactgccatcgtcatttcaaatacatctccctcagggtttccaggtggccacccccaattattcattccttaccaacctctcaaatcctcttggctttctctctgcagtgtggacactgttggctagtcctccccactccctgagggtccagtaagttagcttagaaccttcctggaaacatttcatctgagcaggtttccccacgtgtgggatgctccttttgcctcatctgtctcagggatgcaggctcccccgcatgcatggggatttctccccagaccagcatacttgtgacctgagagttcaatgcgtaaagatgcccctggtcagccatatccatcttctcttgcctggtccttgattctctggccgctccctgaccttcctccttccactgccttgactttcttcctttttattcctggtgccatctgtccaggcagctagacaagaacttgttcgccagcagccagattcaggccttcccaggggcataataagtgaccagcccctcctctccggacatcagatccaacacataaggaccctggcctaccctccagcccaacagccagttctgggtcagctgccaacttaggggtggtttgattatcccattgaaattcaccagtgcctttgccaaagaccctctcatttggacatacccagattcattccctggctccaactgaaaagactcagtttcaatcgttaaaagttcctttagggccagaagaataaatgaattataatcccattttgaagaaccgatttataaccaatgaaaaggttataatgtaatttatattcttggaggaacaagattttcatttgggattatttccttcaaccattcaacaaacatttgttgtatgccactaagcgccaggcacggcgttgggctctgcaaacacagtggttagtagcagtctggacctggtccctactggcatggaacccatcactccccaacatgcaaagcccacatttaaaggccagcctctgccccttcagtgatgcgctctttagaaatgccagtccactatattcagaaatccgcagggcacaaaacttccagcaagtcactgttgtggtgaaatgggcagtgggggtggggggtcttctttaaacaggcccccttcccatctacctagccagtacccatccaatgagtccccagagcctccagaagctgttgtctcctctctggggacagcagctcctgcctttggaggccaaagccccagatctctccagccccagagctgaaaacaccaagtgcctatttgagggtgtctgtctggagacttagagtttgtcatgtgtgtgtgtgtgtttggttaatgtgggtttatgggttttctttcttttttttctttttttttttagtctacattagggggaagtgagcgcctcccatgtgcagacagtgtgtctttatagatttttctaaggctttccccaatgatgtcggtaatttctgatgtttctgaagttcccaggactcacacacccgttcccatctcacttgcccacccagtgtgacaaccctcggtgtggatatacccccgtggactcatggctcttccccacccccactttctataaatgtaggcctagaatacgcttctctgttgcaaaactcagctaagttcctgcttccaccttgatgttgaaatatcttatgtaagagggcaggggatgtcgtgaagatggcaagaagaacacagtttcaaatttctggaaaagagcctgtggtggagatctaaagatgtttagggaagagctcgactaaagaacaatgaaataaatggtccaaggggaagtca

SEQ ID NO: 178 - protein, 665 aa, homo sapiens
MLRERTVRLQYGSRVEAVYVLGTYLWTDVYSAAPAGAQTFSLKHSEHVWVEVVRDGEAEEVATNGKQRWLLSPSTTLRVTMSQASTEASSDKVTVNYYDEEGSIPIDQAGLFLTAIEISLDVDADRDGVVEKNNPKKASWTWGPEGQGAILLVNCDRETPWLPKEDCRDEKVYSKEDLKDMSQMILRTKGPDRLPAGYEIVLYISMSDSDKVGVFYVENPFFGQRYIHILGRRKLYHVVKYTGGSAELLFFVEGLCFPDEGFSGLVSIHVSLLEYMAQDIPLTPIFTDTVIFRIAPWIMTPNILPPVSVFVCCMKDNYLFLKEVKNLVEKTNCELKVCFQYLNRGDRWIQDEIEFGYIEAPHKGFPVVLDSPRDGNLKDFPVKELLGPDFGYVTREPLFESVTSLDSFGNLEVSPPVTVNGKTYPLGRILIGSSFPLSGGRRMTKVVRDFLKAQQVQAPVELYSDWLTVGHVDEFMSFVPIPGTKKFLLLMASTSACYKLFREKQKDGHGEAIMFKGLGGMSSKRITINKILSNESLVQENLYFQRCLDWNRDILKKELGLTEQDIIDLPALFKMDEDHRARAFFPNMVNMIVLDKDLGIPKPFGPQVEEECCLEMHVRGLLEPLGLECTFIDDISAYHKFLGEVHCGTNVRRKPFTFKWWHMVP

SEQ ID NO: 179 - DNA, 2900 bp, homo sapiens
ctcgtccgctcgcgctgcccaccgcggctccagcagctccaggcgcggttccccggcccgcgccgctcccggccccccggctcgggcgcctcccgccgcagcgcaggctcccccgccggccgggctcctgcgcggcgcggctcggctcatgcccccgggcgcggggcacacaggccggccggcagccgctgggaaataggcccccgggggcggtggcggcggcggggccatggcgcggagaccccgggcgccggccgcctccggggaggagttctccttcgtcagcccgctggtgaaatacctgctcttcttcttcaacatgctcttctgggtgatttccatggtgatggtggctgtgggtgtctacgctcggctaatgaagcatgcagaagcagccctagcctgcctggcagtggaccctgccatcctgctgatcgtggtgggtgtcctcatgttcctgctcaccttctgtggctgcattgggtccctccgcgagaacatctgcctcctgcagacgttctccctctgcctcaccgctgtgttcctgctgcagctggccgctgggatcctgggcttcgtcttctcagacaaggctcgagggaaagtgagtgagatcatcaacaatgccattgtgcactaccgagatgacttggatctgcagaacctcattgattttggccagaaaaagtttagctgctgtggagggatttcctacaaggactggtctcagaacatgtatttcaactgctcagaagacaaccccagtcgagagcgctgctctgtgccttactcctgttgcttgcctactcctgaccaggcagtgatcaacactatgtgtggccaaggtatgcaggcctttgactacttggaagctagcaaagtcatctacaccaatggctgtattgacaagttggtcaactggatacacagcaacctattcttacttggtggtgtggctctaggcctggccatcccccagctggtgggaattctgctgtcccagatcctagtgaatcagatcaaagatcagatcaagctacagctctacaaccagcagcaccgggctgacccatggtactgagaatccatcctgcacctcctcaccatggaaactggcaagcctcataaacgaacagcagtgggtgctgaaagcagcaccaaatggagatttggattccagccccccagtgacagcccagtgggaagaagcaaactccagatgggcagaaggcagggtgcacaggtggctccagtctcaggaggatgcgcctcctctcccccatcccagccctcagcattgtgccagagtgatacccttaagtgtttgggtttatgttttcagttttgtttgggaaacagcagttgcacagagagttgggggtactgctgctgccttttcaccgaggcactgccaccaccagctctagcagggatgctcctgagcttggcggacatacttagatcctaacgtgccagtgagacctggctgtggagagtagcactggcagccctgcctggactccacttggcatgataccagctccagaagggaagggagtggagcaggcagtgaggagagagcctgggggtcggctggggacagccgtatgtgctaggtaggagtggagggagatatgtttaccaaatgcctgtcctgccatcctcccaggtagtcagagtgagctacatcctgccccgccttcatttccatggaaacatggcagctaggacacggggtacaacagcagccaaattcttccccacctcccttacttcgaaaaaaagtttggaaccctggtccctatactctgcagtcagaagtgggactgagccatacatgcccttgaattcctccctgtctggccctccctctccagcaagcagggttttctttaacttggcagtgtgcagaggagaagtggtaacacccccaccccattcccctgcatcggagctcagtattcctacagggtaagaggtaggaatcttgctgggacgaggggagccagaagtggcaataaaagcgtgttgacctgggctacgcgggactccatgaattttccattctggcaactggaaggggaggtgtagaagggccctgcagaggacggcactggagactctcctaaacgccacacacctcccccttgctgcccgccacacgcgcgtctccttcaaccgatgcattgccaccctcccacagcctcgccctctgctctaaattaggtcgaaagagtcccagttccaatctaggaacagcataattttgttccaaaacctgatctgtgtttttctaattaaaattaatttgtcacccaaaacaggagggggatggggaggagggacatgagcactccgctggggccgggacggggaatgaggaggaagaaggccctctcttcccctacccgggccctccaggaccttctccctgagtcggctgtagggaggactccgaggaagctcggcgcggtgcgctgggcctcctggcgccgggaggagcgcgcgaggcaggcggggcgggcgcgtccggggcggggcgctggacttcgtgggtggtccccgcccccgcggcggcctaggcccgcgcctgcgtcccccaacccggaggagatggggggctgtgctagctgcttgcccagcgagtgttcccggagtctcctcgccgcaccccgctatcgggcgctcagaccaggggctcggcctggcgggaaatagcctcgaccgaactgctgcggggacaaagagccgcgagttcgctccctgcccccagtgtctcctaagcgagccttctgctcctaggaaggcgcctttccagcagccgctgggaccctggccagtgtttagctcccaactagtaacagacggaaagaaaaaataaaattatccagaatctagaa

SEQ ID NO: 180 - protein, 283 aa, homo sapiens
MARRPRAPAASGEEFSFVSPLVKYLLFFFNMLFWVISMVMVAVGVYARLMKHAEAALACLAVDPAILLIVVGVLMFLLTFCGCIGSLRENICLLQTFSLCLTAVFLLQLAAGILGFVFSDKARGKVSEIINNAIVHYRDDLDLQNLIDFGQKKFSCCGGISYKDWSQNMYFNCSEDNPSRERCSVPYSCCLPTPDQAVINTMCGQGMQAFDYLEASKVIYTNGCIDKLVNWIHSNLFLLGGVALGLAIPQLVGILLSQILVNQIKDQIKLQLYNQQHRADPWY

SEQ ID NO: 181 - DNA, 5121 bp, homo sapiens
acaaaggcgcccgcccgccgcccgccgcccgcgcccgcgccgccgccatgaagccggggccgccgcaccgtgccggggccgcccacggggccggcgccggggccggggccgcggccgggcccggggcccgcgggctgctcctgccaccgctgctgctgctgctgctggcggggcgcgccgcgggggcccagcgctggcgcagtgagaacttcgagagacccgtggacctggagggctctggggatgatgactcctttcccgatgatgaactggatgacctctactcggggtcgggctcgggctacttcgagcaggagtcgggcattgagacagccatgcgcttcagcccagatgtagccctggcggtgtccaccacacctgcggtgctgcccaccacgaacatccagcctgtgggcacaccatttgaagagctcccctctgagcgccccaccctggagccagccaccagccccctggtggtgacagaagtcccggaagagcccagccagagagccaccaccgtctccactaccatggctaccactgctgccacaagcacaggggacccgactgtggccacagtgcctgccacagtggccaccgccacccccagcacccctgcagcacccccttttacggccaccactgctgttataaggaccactggcgtacggaggcttctgcctctcccactgaccacagtggctacggcacgggccactacccccgaggcgccctccccgcccaccacggcggctgtcttggacaccgaggccccaacacccaggctggtcagcacagctacctcccggccaagagcccttcccaggccggccaccacccaggagcctgacatccctgagaggagcaccctgcccctggggaccactgcccctggacccacagaggtggctcagaccccaactccagagaccttcctgaccacaatccgggatgagccagaggttccggtgagtggggggcccagtggagacttcgagctgccagaagaagagaccacacaaccagacacagccaatgaggtggtagctgtgggaggggctgcggccaaggcatcatctccacctgggacactgcccaagggtgcccgcccgggccctggcctcctggacaatgccatcgactcgggcagctcagctgctcagctgcctcagaagagtatcctggagcggaaggaggtgctcgtagctgtgattgtgggcggggtggtgggcgccctctttgctgccttcttggtcacactgctcatctatcgtatgaagaaaaaggatgagggcagctacacgctggaggaacccaagcaggcgagcgtcacataccagaagcctgacaagcaggaggagttctatgcctagtggagccacagtgcctccctgcagcctcaacaccaccctgctgtccagtccccagcctggccccaccagcccaagcctgggactgggcctggaacctggccccagttcttctctgccctctctcccaaggtctgcccaggctgccagcctcacacagatcttccccgaggaagaggggctgctgccatctgccccagactgtgcccttacgagctcatctcttgttcccctcatccctgccaccagtctggggcttcaggacctcatgtcagatggatgggaggaagaaagctcctgattggctggtggtggaagaaagggtggggcttgagatgagcctgagccctgacttggcacccacagtgctcactgagatctcctttttggggcagagaggcactcaggctggtttccaggacaaacatttggtaaacacagcccttgaaatcatctagacactgcaacctcttgctcgtatcccagggcctctctctagctgggtgagagggtgtcccttgtcaccagcctgttttgtcctggtctctctggggttgttgaatctctcctcttgcctgccaagtacacatgtacccagacttcatttctttctgcatcttcccccaagaaacagcttcctgagggtgctggggcagccactggtgaggaggggctgctctgatgtccctcctatgaggggactctgcacagacaccattgcccacactatcaccatattttcactcagtcacacacaagacaaaagcatgcaatgacaaaaccatacgcaatcctgaccgcccagccaatcaagacatatcacagaacacacgcgtccttccaagaatgtttatcctcatgcatcacttacacacccccagacacgtactgcaatgcaagtcactagtcatggtcacatgacagtgacagtgtggcctcctcctaccccaaatacacccacactctggcaccacacacattgtctccagctttcaggcttactggggagggtggaatcgagccagaacaatcagcccatattgggtccccctaagttgccccgtcatactcagtcccatgccatggtgcccacaccaaccatgcagccgccaaccccagccagtgtcagacacaatcccatgtggatgcacagtctcactccacatgacctgctctcaatgctggagggaaacaggcaggcccttgcctttctcggaaaaagtgtggggccacagcccttttagggcattgcatgcaggtgggcctggcttcacccctacctgcttcctccccaccgcagctggcagagggggaggtttggggccagacccccactagctgggagcctgggggctcctctaaggctgaggaaggaaatttggccccaggttgttggggggtcttgggtctcccaggacggaaggcccagggcagggagggggcatgtggttgggctcctttatctccctgtgtccccttcctgctttgagctagggggctgactctgcctcccaggacacaagtctccaaagtgcctgtgagggcgggccctccgcaccctctgccctctgcctggcaggccaacctcagcccacctgcccagaggccctccctgtggacaccccctcacctatttggccaaacaattctggctgcagcttcaggggccatggctggaagcagcccctgcagatccctcaggccccgaggtcagggtttgagggatgagaccaggtgatagtgggggaggggttacttcctttgttacctagcaagtagggctatttccatcggtattttaaatgtggggtcacagatcttttggggagggtgtgcttggcagggggcctcttggagccaaagggatgtggtgtgagttgcgattggctggcactcacacccccacccctcacccacatcccagattcaagtcaggaaggcaggttttatttcagggcccttttcaagatgccctggcagcagatttctgcaggatgaggggtagcggtgtgtaggcagtgagggggaggttccaggggctgtcccacagcctgtcttttccaggctgggctccatcttccagtcccaaaaccctccttcacagggcccagaggcttgtgaggaagccaggtggacccagccttagaagagtgggcatggggggcccctgatatctggagggggcgggttggcctcagtcatctttggagcagaagggctgggtcctggggccacagaccacaaggctcagcctccctaccctgctccctggggtgctgctgtcttggagagcacagctctggtgagacggcctgggcaggccgaggctgagaaaccagggaggatagaggagaaaagggcttgggcccccagccccagaagatgctggaccccaggtgggagacccaacagtgggtgcagtttctcagtagggctggagccaatggtgggggtggccccggcaggcctggctcctcacatcccaggggttggcttctgatttggggcttgggctccaggcactggcttctcttctctgtgtccttagcatttgagagaagaggccaggggccttgttcatggatccctggacccaaggcagatgtccaggctttatcctcctgaggatgaggagtctgaccagcccaaatctgccctggccggcctgaccggggcaaggcagtccaagagagttcagtgaggaccagctaggctctcccaggtgcaatgtgggtgcagggccctcatgtccccctacccctgcctgtgatggagtgttctgaggggctttggcatttgctggaagcacagggagttccaaatgagagggagcttctgtggcttgagagcctctggggccttggctgccagagcacgaggcaggccaggacctggagagcccagaccctgtctccaggaggccaggaggccagatgggggccttgcctgaaagactggtccccttgatcgctggaggcatgtgggtggcaaccagggctgggcagggcttagggtgtgtgggccaaacccccctggggttggcaaagccgcctgtcaggcctcctggtgggggcccctggacacagggagcagaccctctgcctcatggggtaggagtggctgcctcctgtgttctctggatttcttctcccaacaactacaaccctggacttgcctccccaggcctcttgcctgtaaatagaagcccgcaaactgtacagatttacagaggcatcgagactgggccctgggagttgccatctgagagccgatggccccagcatcccccaggtgcctgcctggcaccacagtgaccctggcctcagcgtggcaaatgcatgtaaatatttttcgtaggcagcgtggctccagagagccccctgaagacagtgtccctccctcctgtgagtcctttctcctgtacagaacctgcctggggtgggtgggggtctgccattccctcccccaggccttccctgccccttctctcccctgtaacctgtttattaaccatacctgtcctgagttcatggccaaaaccttaaataagaaaaacaaaagaaaaagacagtggaaaaaagagaccaaggcgcctgccccactgcgggtactctcctgttccagccttgtgaaggaactggttttgtttttgtttttttttttttttttttttttttgtttgtttgtttttttaacacttcctgtgctgtgcccatttataagaggaaataaaattaagctgaaatga

SEQ ID NO: 182 - protein, 442 aa, homo sapiens
MKPGPPHRAGAAHGAGAGAGAAAGPGARGLLLPPLLLLLLAGRAAGAQRWRSENFERPVDLEGSGDDDSFPDDELDDLYSGSGSGYFEQESGIETAMRFSPDVALAVSTTPAVLPTTNIQPVGTPFEELPSERPTLEPATSPLVVTEVPEEPSQRATTVSTTMATTAATSTGDPTVATVPATVATATPSTPAAPPFTATTAVIRTTGVRRLLPLPLTTVATARATTPEAPSPPTTAAVLDTEAPTPRLVSTATSRPRALPRPATTQEPDIPERSTLPLGTTAPGPTEVAQTPTPETFLTTIRDEPEVPVSGGPSGDFELPEEETTQPDTANEVVAVGGAAAKASSPPGTLPKGARPGPGLLDNAIDSGSSAAQLPQKSILERKEVLVAVIVGGVVGALFAAFLVTLLIYRMKKKDEGSYTLEEPKQASVTYQKPDKQEEFYA

SEQ ID NO: 183 - DNA, 3887 bp, homo sapiens
gagagcgccggctgcaaagcgagcgcgagtgtcgacgcgtgcggcgcactaaattgtgccgcgctcgcccccgccagaccatgtcctcctggggaaaaagtttccctagtccccccagcagcgcgccccaccctacgccccgctggaaaaaaaacagcaacataaaatcctaggcttgaacattctgtgcgtcccaaatttctaatgtcctcggcctgcccggtttgccgaagggagccgagtgtcgaagagaagtcgggaaaaggtaagttgtgcagacacttggggaagtttcaaggagaccgccagctcaagatggaaaccgcggcccgggcgctaaggacgggcttcagctcccgctggcaaaaagagaaagtcgagcccgccttcctgcccaacaaaaaacaacaacatgacaacaagaaccccggagggagtggaatgagtgacgtcacagccgcgctctgaggctgacaaaggagggggcgcgcccctcccgctctgcgcccgcgcggccccggagagggggcgcctgaagcgccgggtagggaagtcagccgacttgaaacttttcctcttaaagaaaaaaaaaaaaaagttgtgcgcggctcacagtggggttttttttttccgccttcttttctcgtctcccctcccccttcttccttttgaaagtttcttctcctccccctgccccccctccccgcctgaccgcatggctgattcaactccagtgtcaatcaacttctttttcctcctcttcctcatttaaataagtttaaagctcctcctccccccggcccaccaaatctgaactttataaattgggctttgcgcgccccagcccggagtcagaaaggcgaggggcgccgggaactggcgtgtgggactccagacaggagaggctgcgccttccccgcaccgggaccttcgcgacacaccagatcctcgcccctggctcgcgcgaacgcacaggatgaccaccaccctcgtgtctgccaccatcttcgacttgagcgaagttttatgcaagggtaacaagatgctcaactatagtgctcccagtgcagggggttgcctgctggacagaaaggcagtgggcacccctgctggtgggggcttccctcggaggcactcagtcaccctgcccagctccaagttccaccagaaccagctcctcagcagcctcaagggtgagccagcccccgctctgagctcgcgagacagccgcttccgagaccgctccttctcggaagggggcgagcggctgctgcccacccagaagcagcccgggggcggccaggtcaactccagccgctacaagacggagctgtgccgcccctttgaggaaaacggtgcctgtaagtacggggacaagtgccagttcgcacacggcatccacgagctccgcagcctgacccgccaccccaagtacaagacggagctgtgccgcaccttccacaccatcggcttttgcccctacgggccccgctgccacttcatccacaacgctgaagagcgccgtgccctggccggggcccgggacctctccgctgaccgtccccgcctccagcatagctttagctttgctgggtttcccagtgccgctgccaccgccgctgccaccgggctgctggacagccccacgtccatcaccccaccccctattctgagcgccgatgacctcctgggctcacctaccctgcccgatggcaccaataacccttttgccttctccagccaggagctggcaagcctctttgcccctagcatggggctgcccgggggtggctccccgaccaccttcctcttccggcccatgtccgagtcccctcacatgtttgactctccccccagccctcaggattctctctcggaccaggagggctacctgagcagctccagcagcagccacagtggctcagactccccgaccttggacaactcaagacgcctgcccatcttcagcagactttccatctcagatgactaagccagggtagggagggacctcctgcctactccagcccctaccctgcacccacatcccataccctcttctccctacccatcccattccccacaggccctacattaacaaggttaagctcaacccctttcccccagcacctcagaatgtgccctccctctccccctcataaccccacctaacataaggacaagtcaatttgtcagtagcttcttctggcttgaaaccccctccctggattttatagcccacttaccatgcataacagacaagtcccatattttgtcagtagatgcctttttttttccggcttaagccttaagtgccaaatcacaagagaaaaagcagtaacagtttacagaagcaacttagtgccttgtaatctaactttgtcactgtgactacattacctcttcagcgccagagggcacccgtgggcctcccggagcctctgcccatggcggggtggagacccggaaccagcagccccctccactggcgacacaactgcaccttccctcatttcagtctcccgcacacttattcctcctcccctcttcccggtggcacctctccacctgtacccgcccccccaccccccccacccctgccccttggaagagttgttgccagaccagggttttgggggaaacctgtcttgacattcaaaacctttttcttcccgatctgaacccctgttgactaatcttgcctgggtttgtgtaggtctgcaggaaggaaggctgaaaaagcggacgaagattttgacttaagtgggactttgtgatttaattttttcttttttttaagtggggaggaaggggaagctagatggactaggagagacttgattttggtgctaaagttccccagttcatatgtgacatctttttaaaaaaaataacaacaaaaaaaaaatgagagaaaagctaaaaaaaaaaaagtaaggggtgagcagttaatggtattcattccacatacaatatctgtgtaaaacgatttcctgtagaagtagctttaatggtttttgctctagaataccgtaggtctatccttagagcactcacgccatgctttcttccctgggttttaaacttcatataactttcagaaattggagagcaaaaattttgcttgtcactgcacatcaatataaaaaagcttatttaacttatcaaaacgtatttattgccaaactatgcttttttttgttaattttgttcatatttatcgggatgacaaatccatagaatatattcttttatgttaaattatgatcttcatattaatcttaaaattttgtgacgtgtctttttcctttttttccacagttttaatatattattcttcaacgacattttttgtaactttacacttttttggttattttattttaaaaaaatgaaaaattaatttaaaaaaatgcaaaaaactgttggattatttattttagaaattcccccctttgtgttggactgcaaattgagtttctttctctttaggcctttcacaactaggactgagaatgtatgtaaaagttctgtgacagtacagaaggaaaacaactttttatgtatagcttctaaaaggggaaaaaaaaaaaaagagaaaccctttgacttccacgtgcccatctcaagacattccactcacagatttgaggttctggattccaggtctggagttttccaatgttaatgtaaacagaactggcacacacacattaagatgaatgtaattattattcctcttgctggtcactaccgtcgctttctatttctctttctttgtgtgaatttatttaaaagaaaaaaaaactttttgtaacgactatttgcagtttaaaaatcaataaaccccgttttttcaagaaacattgataaaaaaaaaaaaaaaa

SEQ ID NO: 184 - protein, 338 aa, homo sapiens
MTTTLVSATIFDLSEVLCKGNKMLNYSAPSAGGCLLDRKAVGTPAGGGFPRRHSVTLPSSKFHQNQLLSSLKGEPAPALSSRDSRFRDRSFSEGGERLLPTQKQPGGGQVNSSRYKTELCRPFEENGACKYGDKCQFAHGIHELRSLTRHPKYKTELCRTFHTIGFCPYGPRCHFIHNAEERRALAGARDLSADRPRLQHSFSFAGFPSAAATAAATGLLDSPTSITPPPILSADDLLGSPTLPDGTNNPFAFSSQELASLFAPSMGLPGGGSPTTFLFRPMSESPHMFDSPPSPQDSLSDQEGYLSSSSSSHSGSDSPTLDNSRRLPIFSRLSISDD

SEQ ID NO: 185 - DNA, 6683 bp, homo sapiens
gcatttcttccttctgcgtatgggacaggaccctttctggaatgggggtcttatgacctacaatcaaacaagaacatggacttcccgtgcctctggctagggctgttgctgcctttggtagctgcgctggatttcaactaccaccgccaggaagggatggaagcgtttttgaagactgttgcccaaaactacagttctgtcactcacttacacagtattgggaaatctgtgaaaggtagaaacctgtgggttcttgttgtggggcggtttccaaaggaacacagaattgggattccagagttcaaatacgtggcaaatatgcatggagatgagactgttgggcgggagctgctgctccatctgattgactatctcgtaaccagtgatggcaaagaccctgaaatcacaaatctgatcaatagtacccggatacacatcatgccttccatgaacccagatggatttgaagccgtcaaaaagcctgactgttattacagcatcggaagggaaaattataaccagtatgacttgaatcgaaatttccccgatgcttttgaatataataatgtctcaaggcagcctgaaactgtggcagtcatgaagtggctgaaaacagagacgtttgtcctctctgcaaacctccatggtggtgccctcgtggccagttacccatttgataatggtgttcaagcaactggggcattatactcccgaagcttaacgcctgatgatgatgtttttcaatatcttgcacatacctatgcttcaagaaatcccaacatgaagaaaggagacgagtgtaaaaacaaaatgaactttcctaatggtgttacaaatggatactcttggtatccactccaaggtggaatgcaagattacaactacatctgggcccagtgttttgaaattacgttggagctgtcatgctgtaaatatcctcgtgaggagaagcttccatccttttggaataataacaaagcctcattaattgaatatataaagcaggtgcacctaggtgtaaagggtcaagtttttgatcagaatggaaatccattacccaatgtaattgtggaagtccaagacagaaaacatatctgcccctatagaaccaacaaatatggagagtattatctccttctcttgcctgggtcttatataataaatgttacagtccctggacatgatccacacatcacaaaggtgattattccggagaaatcccagaacttcagtgctcttaaaaaggatattctacttccattccaagggcaattggattctatcccagtatcaaatccttcatgcccaatgattcctctatacagaaatttgccagaccactcagctgcaacaaagcctagtttgttcttatttttagtgagtcttttgcacatattcttcaaataaagtaaaatgtgaaactcaacccacatcaccacctggaatcagggattgctcactccaggttactgcaaccctaactcactctagtgggaccttgactggagaaactccacgatcttcctgaagaagagaaatggatgtttccaaattccacaataagcaatatgtggtgataatgaaaagaatgattcagtcttgacggtgaatggaagacacttacctaacaagtactgctcatttacactcaaattaatcttgaagtagtcttaaaatgtgtaagaagttaaaacttgagaagcaaaaaaatgcctgcaaaaagaagatcattttgtatacagagaaccggatgaatataagcaatgaagatgaacatttattgatcttctacatacaagacttcaccataaggccaggagcagtggctcacaccttgtaatcccagcactttgggaggccaaggtgggcggatcaccctgaggtcaggagttcaaaaccagcctgaccaacatggtgaaaccctgtctctactaaatattagcggggtgtggtggcgggcacctgtaatcgcagcctttcaggaggctgagacaggagaatcgcttgaaccctagaggcggagtttgcagtgagccgagatagtgccattgtactccagcttgggcaacagagtaagactctgtctcaaaaaaaaaaaaacaaaaacaaacaaacaaaaaaaacacctcaccatgagtgctacatgtgaatagatattaagtgccatatataattagttctcagaagaagggagaaatgatcataggactgggaattgttttgcaaacgttctaggagatgtgagagaaaatatgtaaccacatcttagtggcccaagaaaatacaggcctgaagggataagattgtgtctctatagagcttcaaagcatacaggtcaattaagaaagcccctctctctccagagccgtttccctagcttttggcacctggatgccacagtcctccattaggctgatgactccaaagatgtaactctagcctcttgcctgagcttcagactcgcgtcccactgcccacaggacacatccacctggatgtgactcacaggtacctccaacccatcatgtggagatactcatcctgttccccctagagctgctcttcctgctgcattctctctctcaattactgggaccaccaagctaggaacctgggagtcatccttgatactttctcttcctccttaatcctgtgtattcagcaagtaactaaaggttggtgttggccaggcatggtggctcatgcctgtaatcccagcattttgggaggccaaggcgggcggatcacttgaggtcaggagctcaagaccagcctggccaacatggtgaaaccccatctctactaaaaaaaaaaaaaaaattagtcgggcgtggtggtgcatgcctgtaatcccagctactggggaggctgaggcaggagaatcgcttgaacctgggaggcagaggttgcagtgagccgggattgcgccattgtactccagcctgggtgaagaagtgagactctgtcttaaaaaaaaaaattggtgctgataaatattgatgaattctgctctctgctctctatggttgtcaacactgcagagttgaggcctcatatctcacctgcactgctgcaacagcttactggtcccttgctcccagccttctcctcttcagtccatcgtccacacagcactggggaaggggagccacttgaaacaaaagtcaacaactggttgtagttcataaacacagagctgtttgtgtcccctgtatctggaatgccattatgacccactacattttttctttcctacccctcttaaaactcagttcaggtagcagctccactaggaagccttggctgaccataatcccattcaattccatttcacctcttcgcaggcagtctggggttagggaccctttctctttgctccccaaaataaactggttatctctactattggatttacaacattgtattataatcttctccatgtgtgccttctctagtagaatgtgagctctttgaggccaaggtctatttaatttgtttgaaaaattcattgttatatcctcaaagcctagcacatagtaggtactgaatgaatgaatgaacaaggggtgccaggagactgctactcccagtccttcccagaaactgcctagggctttgagtcattttatgaagctaggtcttaatgcgtaggcaacctcccagctcactatgaacgctgacagaagagtgttttcatgtctataatcaagaattccagatacattccttttactgaaccttgaattgatcctaagattggtagtaaaggtattatgttacctcctaacagcactacaaagtacctttttttatcagaaaaaaattttaccattaggactcaatttgaagtactaatgcttctcaagttctccactatgagagttaccctgtattagaccgttacctataagaattaaggggtaaagcactaaacagaaaagaaaaaaaaaatagcaactctggtgagcagatttctttcctttcttccttccttctcctcttcctaccttcctccctcctttccctctcctccccttctctccctttccctccccttcccttccttttcttctttcctccgctcccctccccttccctccccttcccatccttctttctcttttttttacttaatccccagtgtgacagtaatataggctgatttctagaagtgtggtgtattactcatggaaagtgagttgccttggttattactttcaattgaaagttctatgggatctagaaatgagacatactggcatggagagtgagaacgacaaaggaatgaagagctacaggagcatttaggccatttctatgccaagcttattctacatgcacaaaatcatacatgttaataaatataaacaaattggaggcttatttaaaccaattatgaaatctggtaatttgtgcagcagcaatagatgataaccaaaaaaaactcataataatctgaatatcttgatcatttgtatttaaagaagcagtaattatatacttgaaagtacataatatagtattgcaaaaatgactttggtatattacaaattaaaagtatataagatgaaacttgatttgctatcaagccccaagcaatttttcaactgggcattgaattctaacttttctaagatagcaatttttgaagagacacgaacaaaaatctgaattagttcatgagccttaatgtaaatctcttgctgaaatagtttttaaaatcagaatttagttatctatcagactcaaaatcatttaaagactaacaaaacacaatcatgatattctaactgtggtcaaaccaggtacccaagccacctccctgcccaacgcctttccggcttttcccctccctcttgggctggtggttatgctcctccagctctagttcagctataattccttttatagagaaaccaacctgatacacactttcatgatgggagaaaaatgtgggagtgaaatggtatttagaaagcagcagtcaggcacggtggctcatgcctgtaatcccagcactttgggaggctgaggcaggcggatcacttgaggtcaggagctcgagaccagcctggccaacacggtgaaaccccatctctactaaaaaaaaatacaaaaattagccgggcgtggtggcaggcacctgtaatcccagctacttgggaggctgaggcaggagaaatcgcctgaacccagaaggcagaggttgcagtgagccaagatcacatcactgcactgcactccagccggggtgacagagcgaacctctgtctcaaaaaaaaaaaaagaaaaaagaaagaaagaaaaaaggcagaagccctggattcaaatccgccacacattcagtttctttatctgtaaaatggagaccaccccccgccacgctgaacggtgattctgtgactggtaagagatgctacatttttggtgcttgttcaggtggaggaaagatgatagttaacactcaggtaataagtattttgaaggcagtataatataccttcttaaagagtatacctactcaaatgttggtaaatgttgacatgattgaatctaaatggcaaagagtattttagaaaaacattaagtccctgcagataaatgacagtgttgatttggatgcttaattacattcagacatgaactgttggatgtatctgaaatgttaaaagctttttctcaacatttccaaaagtctttccaagaaatcaatgttatgttttgttccagaagcaaatttgcatttgtgatctgtttctaaaaatggtacaagttagctctgtttagaaagtaaaaatatctgatgttagattggaagtatctcttcctggggaatccagaaagataagcatagcatattgtcttactgcaatagataagttgcttattgagaagtctggttgttattctatatggtaacaatacagttgatgtatattttatgatagatcctttatattttcctcatgactttagaagggggaagggggagaaaattatgatgaccagactagttaaagagcattgaaagtccacagtactgtagctaaagtagaagtttgggtttgttatagactttacattatatcaactaataagcagatactgtacagtattgctcaccattttatcatacttttgcatatgaactactccattgccttttatagatgttttatagctgatcttaccagttttcctggtaactttttttatttcttttttttttttttgagacggagtctcgccctaacacccaggttggagtgcagtgccgtgatctcggctcactgcaacctctgcctcccgggttcaagcaattctcctgtctcagcctcccgagtacctgggactaccggtgcctgtctccacgcccggctaattttttgtatttgtagtagagacggggtttcaccgtgttagccaggatggtctcgatctcctgacctcatgatctgcctgcctctgcctggacctcccaaagtgctgggattacaggcgtgagcccccgcgcccagccactttctttaatactataactaagaatttattaaaatgcacaaattgtctaagactgtaaagtttattggggagaggccatgactacctctgaatttagtaaatttaaaatatttctgattctcaataaagaactaatatccatataaaaaaaaaaaaaaaaa

SEQ ID NO: 186 - protein, 443 aa, homo sapiens
MDFPCLWLGLLLPLVAALDFNYHRQEGMEAFLKTVAQNYSSVTHLHSIGKSVKGRNLWVLVVGRFPKEHRIGIPEFKYVANMHGDETVGRELLLHLIDYLVTSDGKDPEITNLINSTRIHIMPSMNPDGFEAVKKPDCYYSIGRENYNQYDLNRNFPDAFEYNNVSRQPETVAVMKWLKTETFVLSANLHGGALVASYPFDNGVQATGALYSRSLTPDDDVFQYLAHTYASRNPNMKKGDECKNKMNFPNGVTNGYSWYPLQGGMQDYNYIWAQCFEITLELSCCKYPREEKLPSFWNNNKASLIEYIKQVHLGVKGQVFDQNGNPLPNVIVEVQDRKHICPYRTNKYGEYYLLLLPGSYIINVTVPGHDPHITKVIIPEKSQNFSALKKDILLPFQGQLDSIPVSNPSCPMIPLYRNLPDHSAATKPSLFLFLVSLLHIFFK

SEQ ID NO: 187 - DNA, 1641 bp, homo sapiens
ctccctgtgttggtggaggatgtctgcagcagcatttaaattctgggagggcttggttgtcagcagcagcaggaggaggcagagcacagcatcgtcgggaccagactcgtctcaggccagttgcagccttctcagccaaacgccgaccaaggaaaactcactaccatgagaattgcagtgatttgcttttgcctcctaggcatcacctgtgccataccagttaaacaggctgattctggaagttctgaggaaaagcagctttacaacaaatacccagatgctgtggccacatggctaaaccctgacccatctcagaagcagaatctcctagccccacagaatgctgtgtcctctgaagaaaccaatgactttaaacaagagacccttccaagtaagtccaacgaaagccatgaccacatggatgatatggatgatgaagatgatgatgaccatgtggacagccaggactccattgactcgaacgactctgatgatgtagatgacactgatgattctcaccagtctgatgagtctcaccattctgatgaatctgatgaactggtcactgattttcccacggacctgccagcaaccgaagttttcactccagttgtccccacagtagacacatatgatggccgaggtgatagtgtggtttatggactgaggtcaaaatctaagaagtttcgcagacctgacatccagtaccctgatgctacagacgaggacatcacctcacacatggaaagcgaggagttgaatggtgcatacaaggccatccccgttgcccaggacctgaacgcgccttctgattgggacagccgtgggaaggacagttatgaaacgagtcagctggatgaccagagtgctgaaacccacagccacaagcagtccagattatataagcggaaagccaatgatgagagcaatgagcattccgatgtgattgatagtcaggaactttccaaagtcagccgtgaattccacagccatgaatttcacagccatgaagatatgctggttgtagaccccaaaagtaaggaagaagataaacacctgaaatttcgtatttctcatgaattagatagtgcatcttctgaggtcaattaaaaggagaaaaaatacaatttctcactttgcatttagtcaaaagaaaaaatgctttatagcaaaatgaaagagaacatgaaatgcttctttctcagtttattggttgaatgtgtatctatttgagtctggaaataactaatgtgtttgataattagtttagtttgtggcttcatggaaactccctgtaaactaaaagcttcagggttatgtctatgttcattctatagaagaaatgcaaactatcactgtattttaatatttgttattctctcatgaatagaaatttatgtagaagcaaacaaaatacttttacccacttaaaaagagaatataacattttatgtcactataatcttttgttttttaagttagtgtatattttgttgtgattatctttttgtggtgtgaataaatcttttatcttgaatgtaataagaatttggtggtgtcaattgcttatttgttttcccacggttgtccagcaattaataaaacataaccttttttactgcctaaaaaaaaaaaaaaaaa

SEQ ID NO: 188 - protein, 314 aa, homo sapiens
MRIAVICFCLLGITCAIPVKQADSGSSEEKQLYNKYPDAVATWLNPDPSQKQNLLAPQNAVSSEETNDFKQETLPSKSNESHDHMDDMDDEDDDDHVDSQDSIDSNDSDDVDDTDDSHQSDESHHSDESDELVTDFPTDLPATEVFTPVVPTVDTYDGRGDSVVYGLRSKSKKFRRPDIQYPDATDEDITSHMESEELNGAYKAIPVAQDLNAPSDWDSRGKDSYETSQLDDQSAETHSHKQSRLYKRKANDESNEHSDVIDSQELSKVSREFHSHEFHSHEDMLVVDPKSKEEDKHLKFRISHELDSASSEVN

SEQ ID NO: 189 - DNA, 6791 bp, homo sapiens
ggacccgccgcagagccaggtaagcggccctcgcaggcctcgggccgggcacggggactaggatgccgccggggacggggatgaggccgtgaggatgcgcgaagggccgccccctctcccggcccgcggggggcgctcggcgctgtgcccgggctagcccgaggcccggcctcaggccccacgcggcccctttccccctcggacccaccgtgcgtcccgcggcacggaccctctgcccgggaggcgcgggcacatcgcggagctccggcgcggcggcgggggagccgcagcagcaggtgcgcggcctgggccggagccgccagcccgggaggaggcggtgctaatctcagggaccggagacacctgcagcggccgcgagcccggcagcggcgacatcctcgagtccagtgcagaatacagaaactgcagccatgaccacgcacgtcaccctggaagatgccctgtccaacgtggacctgcttgaagagcttcccctccccgaccagcagccatgcatcgagcctccaccttcctccatcatgtaccaggctaactttgacacaaactttgaggacaggaatgcatttgtcacgggcattgcaaggtacattgagcaggctacagtccactccagcatgaatgagatgctggaggaaggacatgagtatgcggtcatgctgtacacctggcgcagctgttcccgggccattccccaggtgaaatgcaacgagcagcccaaccgagtagagatctatgagaagacagtagaggtgctggagccggaggtcaccaagctcatgaagttcatgtattttcagcgcaaggccatcgagcggttctgcagcgaggtgaagcggctgtgccatgccgagcgcaggaaggactttgtctctgaggcctacctcctgacccttggcaagttcatcaacatgtttgctgtcctggatgagctaaagaacatgaagtgcagcgtcaagaatgaccactctgcctacaagagggcagcacagttcctgcggaagatggcagatccccagtctatccaggagtcgcagaacctttccatgttcctggccaaccacaacaggatcacccagtgtctccaccagcaacttgaagtgatcccaggctatgaggagctgctggctgacattgtcaacatctgtgtggattactacgagaacaagatgtacctgactcccagtgagaaacatatgctcctcaaggtgatgggctttggcctctacctaatggatggaaatgtcagtaacatttacaaactggatgccaagaagagaattaatcttagcaaaattgataaattctttaagcagctgcaggtggtgccccttttcggcgacatgcagatagagctggccagatacattaagaccagtgctcactatgaagagaacaagtccaagtggacgtgcacccagagcagcatcagcccccagtacaatatctgcgagcagatggttcagatccgggatgaccacatccgcttcatctccgagctcgctcgctacagcaacagtgaggtggtgacgggctcagggctggacagccagaagtcagacgaggagtatcgcgagctcttcgacctagccctgcggggtctgcagcttctatccaagtggagcgcccacgtcatggaggtgtactcttggaagctggttcatcccacagacaagttctgcaacaaggactgtcctggcaccgcggaggaatatgagagagccacacgctacaattacaccagtgaggaaaaatttgccttcgttgaggtgatcgccatgatcaaaggcctgcaggtgctcatgggcaggatggagagcgtcttcaaccaggccatcaggaacaccatctacgcggcattgcaggacttcgcccaggtgacgctgcgtgagcccctgcggcaggcggtacggaagaagaagaatgtcctcatcagcgtcctacaggcaattcgaaagaccatctgtgactgggagggagggcgagagccccctaatgacccatgcttgagaggggagaaggaccccaaaggtggatttgatatcaaggtgccccggcgtgctgtggggccatccagcacacagctgtacatggtgcggaccatgcttgaatcactcattgcagacaaaagcggctccaagaagaccctgaggagcagcctggatggacccattgtcctcgccatagaggactttcacaaacagtccttcttcttcacacatctgctcaacatcagtgaagccctgcagcagtgttgtgacctctcccagctctggttccgagaattcttcctggagttaaccatgggccgacgaatccagttccccatcgagatgtccatgccctggattctaacggaccatatcctggaaaccaaagaaccttccatgatggagtatgtcctctaccctctggatctgtacaacgacagcgcctactatgctctgaccaagtttaaaaagcagttcctgtacgatgagatagaagctgaggtgaacctgtgttttgatcagtttgtctacaagctggcagaccagatctttgcttactacaaagccatggctggcagtgtcctgttggataaacgttttcgagctgagtgtaagaattatggcgtcatcattccgtatccaccgtccaatcgctatgaaacactgctgaagcagagacacgtccagctgttgggtagatcaattgacttgaacagactcattacccagcgcatctctgccgccatgtataaatccttggaccaagctatcagccgctttgagagtgaggacctgacctccattgtggagctggagtggctgctggagattaaccggctcacgcatcggctgctctgtaagcatatgacgctggacagcttcgatgccatgttccgagaggccaatcacaatgtgtccgccccctatggccgtatcaccctgcatgtcttctgggaactgaactttgactttctccccaactactgctacaatgggtccactaaccgttttgtgcggactgccattcctttcacccaagaaccacaacgagacaaacctgccaacgtccagccttattacctctatggatccaagcctctcaacattgcctacagccacatctacagctcctacaggaatttcgtggggccacctcatttcaagactatctgcagactcctgggttatcagggcatcgctgtggtcatggaggaactgctaaagattgtgaagagcttgctccaaggaaccattctccagtatgtgaaaacactgatagaggtgatgcccaagatatgccgcttgccccgacatgagtatggctccccagggatcctggagttcttccaccaccagctgaaggacatcattgagtacgcagagctcaaaacagacgtgttccagagcctgagggaagtgggcaatgccatcctcttctgcctcctcatagagcaagctctgtctcaggaggaggtctgcgatttgctccatgccgcacccttccaaaacatcttgcctagagtctacatcaaagagggggagcgcctggaggtccggatgaaacgtctggaagccaagtatgccccgctccacctggtccctctgatcgagcggctggggacccctcagcaaatcgccattgctcgcgagggtgacctcctgaccaaggagcggctgtgctgtggcctgtccatgttcgaggtcatcctgacccgcattcggagctacctgcaggaccccatctggcggggcccaccgcccaccaatggcgtcatgcacgtcgatgagtgtgtggagttccaccggctgtggagcgccatgcagttcgtgtactgcatccctgtgggaaccaacgagttcacagctgagcagtgtttcggcgatggcttgaactgggctggttgctccatcattgtcctgctgggccagcagcgtcgctttgacctgttcgacttctgttaccacctgctaaaagtgcagaggcaggacgggaaggatgaaatcattaagaatgtgcccctgaagaagatggccgaccggatcaggaagtatcagatcttgaacaatgaggtttttgccatcctgaacaaatacatgaagtccgtggagacagacagttccactgtggagcatgtgcgctgcttccagccacccatccaccagtccttggccaccacttgctaagcagaagatcctgcagacccttatctggaggaggaagagaagcaggagagagaaagccacagccagcctgccataggatccaactggacaacgtgtgggatggacctggaaacaagcacctccccaaacacatcaccactccctagggcggggcctgtgcatgctctcccatgacatctccatgctggtttctccatagcataaatgaaaaaaaaaaaaaaaaagtaaacagggcagtgtgtgctttttcttttctcccccctcaactatattaagaactcctagtttcaccctttctccatcccatcatcccacctatctgtggttgcttcccaagacctcctcccaagatagacatctcctacccagtgcccttgtgtgaccccaggactcaagtctcagactgtgaacagatgtggccatgcccagagacgccagcctggccagaagggcatgcctcagcttactacttcatctctcctggttccctccctgcagtgccccgggtgtcatcttctcccactctgggtaccagggattctaccacataggcttcccaaagccccattctaactcccctctctcagggaagccctagagagaggtccaaaaagcattcacagctgtatcacactctatgcaggtggggtaggagactgatcaggcctgctgtggggaagcagtatgtatgaacacagccagaaatgtcatagtccaaacaggatgctttcaggccatctcagctgcttgatggtgagatggttcccttattccttcaggaaaggcttagcattgggccacataggggaagcagctttgaacaaatcagtcatagcactgcctatagcattagccagtgaccaaattagggacaacgtcttggcacagaattgcttatcaaggaacatttccacaagaaagaaaatattaaggggttatttccacagaagcccaaaacgtcttggaaacacagaggtgaggaggaggaatagtaattgtcaatgagcttttaataccaagatacaccccctgcccccaaagaagagtcctcttttagggaatcagaaccttcattgtcctagaagctgaaagattcttggaacattttagcttttactctcaacttgctgttctctttacattccttaagttagactttcgggtgtggcttctctcccaggggtaacatttacttccattttctagactgaaccaaaagtcttctgcagaatctcccaccgagtgtggtaagaaggaaggacaaaaggctttaggatataaatttcatgttacagagcatgtcattgtcaaaggaaatctgtggccctgagattttaagaacataaaatgtgacatttgatatttctccagcccagggaagtaagatggttagcaatggttgccttaatcaaatggtcccatttttaaccccaaaggaagtgcccacagcaagaggtttgtgtgatgcacttatgtcctccggtgaggaaagggggccacatatgaaaggccccttaggtcagatcctgagagtagcacatttgagtgcagattcctgggccccacctcaaacctactaattctgaatctctgggaatagggccaggaaatctgccctttctacaaactacccaagttgttctgttgcacatcaatgtttgggaaccactgctgtaagggaatcattctggtcaccttgagctttgagctaccactaagccatgaaagaaaatacatcatacagggaagagagaagggaggaggttccaagtagtaactggcagatcctcctgtctggaggtaccaccttctattctggtttctgacttttccttcttgatgaccatagatgtgttccagaggcaaaagagacacattatcccagatggcagaacatgctttcaaaacatataaaatgtcaaagttccagatccttctacatctttagtcctgtctgaggatggtagctggctctctgtagctgatagatggctagagttccatccaaatccttgaccacgacttcatggagatttgaataatctatttgatgagatttctatttcaataacccacctctctcaccccacattcatatccctaaatttgaccctctgggccgagtcacattaccttcaggagacttgatcccagtagactgaggtcttccctttcagcagaaagatttcatttccctggcttgccagtggcactgatttccgaacacccaatgagtttaatattctttcctccttggcattactgccccagcctctttttattttttttgtgtgtgtctaataaccaggaaaaaaataaagcttaggttttaaaaagttttaaaaataatctgtttcagaaactgtcaaatgtaccatatttgtattaagagttgttgggaatttttgtacaatgaatttacatttatttatggtgacatatttacgcttgtgatcaaataatgatgttaaattcttaaatcatatttgctatgcagctgaagatgatattttgatttgtattttgggggtacctgtgttgagttgataaacatttccatcttcattaaaactgcttccaaactagtaaaaccagcaa

SEQ ID NO: 190 - protein, 1253 aa, homo sapiens
MTTHVTLEDALSNVDLLEELPLPDQQPCIEPPPSSIMYQANFDTNFEDRNAFVTGIARYIEQATVHSSMNEMLEEGHEYAVMLYTWRSCSRAIPQVKCNEQPNRVEIYEKTVEVLEPEVTKLMKFMYFQRKAIERFCSEVKRLCHAERRKDFVSEAYLLTLGKFINMFAVLDELKNMKCSVKNDHSAYKRAAQFLRKMADPQSIQESQNLSMFLANHNRITQCLHQQLEVIPGYEELLADIVNICVDYYENKMYLTPSEKHMLLKVMGFGLYLMDGNVSNIYKLDAKKRINLSKIDKFFKQLQVVPLFGDMQIELARYIKTSAHYEENKSKWTCTQSSISPQYNICEQMVQIRDDHIRFISELARYSNSEVVTGSGLDSQKSDEEYRELFDLALRGLQLLSKWSAHVMEVYSWKLVHPTDKFCNKDCPGTAEEYERATRYNYTSEEKFAFVEVIAMIKGLQVLMGRMESVFNQAIRNTIYAALQDFAQVTLREPLRQAVRKKKNVLISVLQAIRKTICDWEGGREPPNDPCLRGEKDPKGGFDIKVPRRAVGPSSTQLYMVRTMLESLIADKSGSKKTLRSSLDGPIVLAIEDFHKQSFFFTHLLNISEALQQCCDLSQLWFREFFLELTMGRRIQFPIEMSMPWILTDHILETKEPSMMEYVLYPLDLYNDSAYYALTKFKKQFLYDEIEAEVNLCFDQFVYKLADQIFAYYKAMAGSVLLDKRFRAECKNYGVIIPYPPSNRYETLLKQRHVQLLGRSIDLNRLITQRISAAMYKSLDQAISRFESEDLTSIVELEWLLEINRLTHRLLCKHMTLDSFDAMFREANHNVSAPYGRITLHVFWELNFDFLPNYCYNGSTNRFVRTAIPFTQEPQRDKPANVQPYYLYGSKPLNIAYSHIYSSYRNFVGPPHFKTICRLLGYQGIAVVMEELLKIVKSLLQGTILQYVKTLIEVMPKICRLPRHEYGSPGILEFFHHQLKDIIEYAELKTDVFQSLREVGNAILFCLLIEQALSQEEVCDLLHAAPFQNILPRVYIKEGERLEVRMKRLEAKYAPLHLVPLIERLGTPQQIAIAREGDLLTKERLCCGLSMFEVILTRIRSYLQDPIWRGPPPTNGVMHVDECVEFHRLWSAMQFVYCIPVGTNEFTAEQCFGDGLNWAGCSIIVLLGQQRRFDLFDFCYHLLKVQRQDGKDEIIKNVPLKKMADRIRKYQILNNEVFAILNKYMKSVETDSSTVEHVRCFQPPIHQSLATTC

SEQ ID NO: 191 - DNA, 9467 bp, homo sapiens
gcggccaggggcgggcggccgcagagcagcaccggccgtggctccggtagcagcaagttcgaaccccgctcccgctccgcttcggttctcgctccttcggcccttgggcctccaaacaccagtccccggcagctcgttgcgcattgcgctctccccgccaccaggatgccggtaaccgagaaggatctagctgaggacgcgccttggaagaagatccagcagaacacgttcacacgctggtgcaacgagcacctcaagtgcgtgaacaaacgcatcggcaacctgcagaccgacctgagcgacgggctgcggctcatcgcgctgctcgaggtgctcagccagaagcgcatgtaccgcaagtaccatcagcggcccacctttcgccagatgcagctcgagaatgtgtccgtggcgctcgagttcctggaccgtgagagcatcaagctcgtgtccatcgatagcaaagccattgtggatgggaacctgaagctcatcttgggtctggtgtggacgctgatcctccactactccatctccatgcccgtgtgggaggatgaaggggatgatgatgccaagaagcagacgccaaagcagaggctgctggggtggattcagaacaagatcccctacttgcccatcaccaactttaaccagaactggcaagacggcaaagccctgggagccctggtagacagctgtgctccaggtctgtgcccagactgggaatcctgggacccgcagaagcctgtggataatgcacgagaagccatgcagcaggcagatgactggctgggtgtcccacaggtcatcactcctgaagaaatcattcacccggatgtggacgagcactcagttatgacttacctgtcccagttccccaaagccaagctcaagccgggggctcctctcaaacccaaactcaacccgaagaaagccagggcctatggcagaggaatcgagcccactggaaacatggtgaagcagccagccaagttcactgtggacaccatcagcgccgggcaaggagacgtgatggtgtttgttgaggacccagaagggaacaaagaggaggcacaagtgacccctgacagtgacaagaacaagacatactctgtggagtatctgcccaaggtcaccgggctacacaaagtcacagtcctctttgcaggacagcacatctccaagagcccatttgaagtgagtgttgacaaggcccagggagatgccagtaaagtcactgcaaaaggtccagggttggaagctgtagggaacatcgccaataagcccacctactttgacatctatacggcaggagctggtgtgggtgacattggtgtggaggtggaagatccccaggggaagaacaccgtggagttgctcgtggaagacaaaggaaaccaggtgtatcgatgtgtgtacaaacccatgcagcctggccctcacgtggtcaagatcttctttgctggggacactattcctaagagtcccttcgttgtgcaggttggggaagcctgcaatccaaatgcctgccgggccagtggccgaggcctacaacccaaaggcgtccgtatccgggagaccacagatttcaaggttgacaccaaagctgcaggaagtggggagctcggtgtaaccatgaagggtcctaagggtctggaggagctggtgaagcagaaagactttctggatggggtctacgcattcgagtattaccccagcaccccggggagatacagcattgccatcacatgggggggacaccacattccaaagagcccctttgaagttcaagttggccctgaagcgggtatgcagaaagtccgtgcttggggccctgggctccatggtgggattgtcgggcggtcagcggacttcgtggtagaatccattggctctgaagtggggtctctggggtttgccattgaaggcccctctcaggcaaagattgagtacaacgaccagaatgatggatcgtgtgatgtcaaatactggcccaaggagcctggcgaatatgctgttcacatcatgtgtgacgacgaagacatcaaggacagcccgtacatggccttcatccacccagccacgggaggctacaaccctgatctggttcgagcatacgggccaggtttggagaaatctggatgcattgtcaacaacctggccgagttcactgtggatcctaaggatgctggaaaagctcccttaaagatatttgctcaggatggggaaggccaacgcattgacatccagatgaagaaccggatggacggcacatatgcatgctcatacaccccggtgaaggccatcaagcacaccattgctgtggtctggggaggcgtgaacatcccgcacagcccctacagggtcaacatcgggcaaggtagccatcctcagaaggtcaaagtgtttgggccaggtgtggagagaagtggtctgaaggcaaatgaacctacacacttcacggtggactgtactgaggctggggaaggtgatgtcagtgttggcattaagtgtgatgcccgggtgttaagtgaagatgaggaagacgtggattttgacattattcacaatgccaatgatacgttcacagtcaaatatgtgcctcctgctgctgggcgatacactatcaaagttctctttgcatctcaggaaatccccgccagccctttcagagtcaaagttgacccttcccacgatgccagcaaagtgaaggcagaaggcccagggctcagcaaagcaggtgtggaaaatgggaaaccgacccacttcactgtctacaccaagggggctgggaaagccccgctcaacgtgcagttcaacagccctcttcctggcgatgcagtgaaggatttggatatcatcgataattatgactactctcacacggttaaatatacacccacccaacagggcaacatgcaggttctggtgacttacggtggcgatcccatccctaaaagccctttcactgtgggtgttgctgcaccgctggatctgagcaagataaaactcaatgggctggaaaacagggtggaagttgggaaggatcaggagttcaccgttgataccaggggggcaggaggccaggggaagctggacgtgacaatcctcagcccctctcggaaggtcgtgccatgcctagtgacacctgtgacaggccgggagaacagcacggccaagttcatccctcgggaggaggggctgtatgctgtagacgtgacctacgatggacaccctgtgcccgggagcccctacacagtggaggcctcgctgccaccagatcccagcaaggtgaaggcccacggtcccggcctcgaaggtggtctcgtgggcaagcctgccgagttcaccatcgataccaaaggagctggtactggaggtctgggcttaacggtggaaggtccgtgcgaggccaaaatcgagtgctccgacaatggtgatgggacctgctccgtctcttaccttcccacaaaacccggggagtacttcgtcaacatcctctttgaagaagtccacatacctgggtctcccttcaaagctgacattgaaatgccctttgacccctctaaagtcgtggcatcggggccaggtctcgagcacgggaaggtgggtgaagctggcctccttagcgtcgactgctcggaagcgggaccgggggccctgggcctggaagctgtctcggactcgggaacaaaagccgaagtcagtattcagaacaacaaagatggcacctacgcggtgacctacgtgcccctgacggccggcatgtacacgttgaccatgaagtatggtggcgaactcgtgccacacttccccgcccgggtcaaggtggagcccgccgtggacaccagcaggatcaaagtctttggaccaggaatagaagggaaagatgtgttccgggaagctaccaccgactttacagttgactctcggccgctgacccaggttgggggtgaccacatcaaggcccacattgccaacccctcaggggcctccaccgagtgctttgtcacagacaatgcggatgggacctaccaggtggaatacacaccctttgagaaaggtctccatgtagtggaggtgacatatgatgacgtgcctatcccaaacagtcccttcaaggtggctgtcactgaaggctgccagccatctagggtgcaagcccaaggacctggattgaaagaggcctttaccaacaagcccaatgtcttcaccgtggttaccagaggcgcaggaattggtgggcttggcataactgttgagggaccatcagagtcgaagataaattgcagagacaacaaggatggcagctgcagtgctgagtacattcctttcgcaccgggggattacgatgttaatatcacatatggaggagcccacatccccggcagccccttcagggttcctgtgaaggatgttgtggaccccagcaaggtcaagattgccggccccgggctgggctcaggcgtccgagcccgtgtcctgcagtccttcacggtggacagcagcaaggctggcctggctccgctggaagtgagggttctgggcccacgaggcttggtggagccagtgaacgtggtggacaatggagatggcacacacacagtaacctacaccccatctcaggagggaccttacatggtctcagttaaatatgctgatgaagagattcctcgcagtcccttcaaggtcaaggtccttcccacatatgatgccagcaaagtgactgccagtggccccggccttagttcctatggtgtgcctgccagtctacctgtggactttgcaattgatgcccgagatgccggggaaggcctgcttgctgttcaaataacggaccaagaaggaaaacccaaaagagccattgtccatgacaataaagatggcacgtatgctgtcacctacatccccgacaagactgggcgctatatgattggagtcacctacgggggtgacgacatcccactttctccttatcgcatccgagccacacagacgggtgatgccagcaagtgcctggccacgggtcctggaatcgcctccactgtgaaaactggcgaagaagtaggctttgtggttgatgccaagactgccgggaagggtaaagtgacctgcacggttctgaccccagatggcactgaggccgaggccgatgtcattgagaatgaagatggaacctatgacatcttctacacagctgccaagccgggcacatatgtgatctatgtgcgcttcggtggtgttgatattcctaacagccccttcactgtcatggccacagatggggaagtcacagccgtggaggaggcaccggtaaatgcatgtccccctggattcaggccctgggtgaccgaagaggcctatgtcccagtgagtgacatgaacggcctgggatttaagccttttgacctggtcattccgtttgctgtcaggaaaggagaaatcactggagaggtccacatgccttctgggaagacagccacacctgagattgtggacaacaaggacggcacggtcactgttagatatgcccccactgaggtcgggctccatgagatgcacatcaaatacatgggcagccacatccctgagagcccactccagttctacgtgaactaccccaacagtggaagtgtttctgcatacggtccaggcctcgtgtatggagtggccaacaaaactgccaccttcaccatcgtcacagaggatgcaggagaaggtggtctggacttggctattgagggcccctcaaaagcagaaatcagctgcattgacaataaagatgggacatgcacagtgacctacctgccgactctgccaggcgactacagcattctggtcaagtacaatgacaagcacatccctggcagccccttcacagccaagatcacagatgacagcaggcggtgctcccaggtgaagttgggctcagccgctgacttcctgctcgacatcagtgagactgacctcagcagcctgacggccagcattaaggccccatctggccgagacgagccctgtctcctgaagaggctgcccaacaaccacattggcatctccttcatcccccgggaagtgggcgaacatctggtcagcatcaagaaaaatggcaaccatgtggccaacagccccgtgtctatcatggtggtccagtcggagattggtgacgcccgccgagccaaagtctatggccgcggcctgtcagaaggccggactttcgagatgtctgacttcatcgtggacacaagggatgcaggttatggtggcatatccttggcggtggaaggccccagcaaagtggacatccagacggaggacctggaagatggcacctgcaaagtctcctacttccctaccgtgcctggggtttatatcgtctccaccaaattcgctgacgagcacgtgcctgggagcccatttaccgtgaagatcagtggggagggaagagtcaaagagagcatcacccgcaccagtcgggccccgtccgtggccactgtcgggagcatttgtgacctgaacctgaaaatcccagaaatcaacagcagtgatatgtcggcccacgtcaccagcccctctggccgtgtgactgaggcagagattgtgcccatggggaagaactcacactgcgtccggtttgtgccccaggagatgggcgtgcacacggtcagcgtcaagtaccgtgggcagcacgtcaccggcagccccttccagttcaccgtggggccacttggtgaaggaggcgcccacaaggtgcgggcaggaggccctggcctggagagaggagaagcgggagtcccagctgagttcagcatttggacccgggaagcaggcgctggaggcctctccatcgctgttgagggccccagtaaggccgagattacattcgatgaccataaaaatgggtcgtgcggtgtatcttatattgcccaagagcctggtaactacgaggtgtccatcaagttcaatgatgagcacatcccggaaagcccctacctggtgccggtcatcgcaccctccgacgacgcccgccgcctcactgttatgagccttcaggaatcgggattaaaagttaaccagccagcatcctttgctataaggttgaatggcgcaaaaggcaagattgatgcaaaggtgcacagcccctctggagccgtggaggagtgccacgtgtctgagctggagccagataagtatgctgttcgcttcatccctcatgagaatggtgtccacaccatcgatgtcaagttcaatgggagccacgtggttggaagccccttcaaagtgcgcgttggggagcctggacaagcggggaaccctgccctggtgtccgcctatggcacgggactcgaagggggcaccacaggtatccagtcggaattctttattaacaccacccgagcaggtccagggacattatccgtcaccatcgaaggcccatccaaggttaaaatggattgccaggaaacacctgaagggtacaaagtcatgtacacccccatggctcctggtaactacctgatcagcgtcaaatacggtgggcccaaccacatcgtgggcagtcccttcaaggccaaggtgacaggccagcgtctagttagccctggctcagccaacgagacctcatccatcctggtggagtcagtgaccaggtcgtctacagagacctgctatagcgccattcccaaggcatcctcggacgccagcaaggtgacctctaagggggcagggctctcaaaggcctttgtgggccagaagagttccttcctggtggactgcagcaaagctggctccaacatgctgctgatcggggtccatgggcccaccaccccctgcgaggaggtctccatgaagcatgtaggcaaccagcaatacaacgtcacatacgtcgtcaaggagaggggcgattatgtgctggctgtgaagtggggggaggaacacatccctggcagcccttttcatgtcacagtgccttaaaacagttttctcaaatcctggagagagttcttgtggttgcttttgttgcttgtttgtaattcattttatacaaagccctccagcctgtttgtggggctgaaaccccatccctaaaatattgctgttgtaaaatgccttcagaaataagtcctagactggactcttgagggacatattggagaatcttaagaaatgcaagcttgttcagggggctgagaagatcctgagtacactaggtgcaaaccagaactcttggtggaacagaccagccactgcagcagacagaccaggaacacaatgagactgacatttcaaaaaaacaaaactggctagcctgagctgctggttcactcttcagcatttatgaaacaaggctaggggaagatgggcagagaaaaaggggacacctagtttggttgtcatttggcaaaggagatgacttaaaatccgcttaatctcttccagtgtccgtgttaatgtatttggctattagatcactagcactgctttaccgctcctcatcgccaacacccccatgctctgtggccttcttacacttctcagagggcagagtggcagccgggcaccctacagaaactcagagggcagagtggcagccaggcccacatgtctctcaagtacctgtcccctcgctctggtgattatttcttgcagaatcaccacacgagaccatcccggcagtcatggttttgctttagttttccaagtccgtttcagtcccttccttggtctgaagaaattctgcagtggcgagcagtttcccacttgccaaagatcccttttaaccaacactagcccttgtttttaacacacgctccagcccttcatcagcctgggcagtcttaccaaaatgtttaaagtgatctcagaggggcccatggattaacgccctcatcccaaggtccgtcccatgacataacactccacacccgccccagccaacttcatgggtcactttttctggaaaataatgatctgtacagacaggacagaatgaaactcctgcgggtctttggcctgaaagttgggaatggttgggggagagaagggcagcagcttattggtggtcttttcaccattggcagaaacagtgagagctgtgtggtgcagaaatccagaaatgaggtgtagggaattttgcctgccttcctgcagacctgagctggctttggaatgaggttaaagtgtcagggacgttgcctgagcccaaatgtgtagtgtggtctgggcaggcagacctttaggttttgctgcttagtcctgaggaagtggccactcttgtggcaggtgtagtatctggggcgagtgttgggggtaaaagcccaccctacagaaagtggaacagcccggagcctgatgtgaaaggaccacgggtgttgtaagctgggacacggaagccaaactggaatcaaacgccgactgtaaattgtatcttataacttattaaataaaacatttgctccgtaaagttg

SEQ ID NO: 192 - protein, 2602 aa, homo sapiens
MPVTEKDLAEDAPWKKIQQNTFTRWCNEHLKCVNKRIGNLQTDLSDGLRLIALLEVLSQKRMYRKYHQRPTFRQMQLENVSVALEFLDRESIKLVSIDSKAIVDGNLKLILGLVWTLILHYSISMPVWEDEGDDDAKKQTPKQRLLGWIQNKIPYLPITNFNQNWQDGKALGALVDSCAPGLCPDWESWDPQKPVDNAREAMQQADDWLGVPQVITPEEIIHPDVDEHSVMTYLSQFPKAKLKPGAPLKPKLNPKKARAYGRGIEPTGNMVKQPAKFTVDTISAGQGDVMVFVEDPEGNKEEAQVTPDSDKNKTYSVEYLPKVTGLHKVTVLFAGQHISKSPFEVSVDKAQGDASKVTAKGPGLEAVGNIANKPTYFDIYTAGAGVGDIGVEVEDPQGKNTVELLVEDKGNQVYRCVYKPMQPGPHVVKIFFAGDTIPKSPFVVQVGEACNPNACRASGRGLQPKGVRIRETTDFKVDTKAAGSGELGVTMKGPKGLEELVKQKDFLDGVYAFEYYPSTPGRYSIAITWGGHHIPKSPFEVQVGPEAGMQKVRAWGPGLHGGIVGRSADFVVESIGSEVGSLGFAIEGPSQAKIEYNDQNDGSCDVKYWPKEPGEYAVHIMCDDEDIKDSPYMAFIHPATGGYNPDLVRAYGPGLEKSGCIVNNLAEFTVDPKDAGKAPLKIFAQDGEGQRIDIQMKNRMDGTYACSYTPVKAIKHTIAVVWGGVNIPHSPYRVNIGQGSHPQKVKVFGPGVERSGLKANEPTHFTVDCTEAGEGDVSVGIKCDARVLSEDEEDVDFDIIHNANDTFTVKYVPPAAGRYTIKVLFASQEIPASPFRVKVDPSHDASKVKAEGPGLSKAGVENGKPTHFTVYTKGAGKAPLNVQFNSPLPGDAVKDLDIIDNYDYSHTVKYTPTQQGNMQVLVTYGGDPIPKSPFTVGVAAPLDLSKIKLNGLENRVEVGKDQEFTVDTRGAGGQGKLDVTILSPSRKVVPCLVTPVTGRENSTAKFIPREEGLYAVDVTYDGHPVPGSPYTVEASLPPDPSKVKAHGPGLEGGLVGKPAEFTIDTKGAGTGGLGLTVEGPCEAKIECSDNGDGTCSVSYLPTKPGEYFVNILFEEVHIPGSPFKADIEMPFDPSKVVASGPGLEHGKVGEAGLLSVDCSEAGPGALGLEAVSDSGTKAEVSIQNNKDGTYAVTYVPLTAGMYTLTMKYGGELVPHFPARVKVEPAVDTSRIKVFGPGIEGKDVFREATTDFTVDSRPLTQVGGDHIKAHIANPSGASTECFVTDNADGTYQVEYTPFEKGLHVVEVTYDDVPIPNSPFKVAVTEGCQPSRVQAQGPGLKEAFTNKPNVFTVVTRGAGIGGLGITVEGPSESKINCRDNKDGSCSAEYIPFAPGDYDVNITYGGAHIPGSPFRVPVKDVVDPSKVKIAGPGLGSGVRARVLQSFTVDSSKAGLAPLEVRVLGPRGLVEPVNVVDNGDGTHTVTYTPSQEGPYMVSVKYADEEIPRSPFKVKVLPTYDASKVTASGPGLSSYGVPASLPVDFAIDARDAGEGLLAVQITDQEGKPKRAIVHDNKDGTYAVTYIPDKTGRYMIGVTYGGDDIPLSPYRIRATQTGDASKCLATGPGIASTVKTGEEVGFVVDAKTAGKGKVTCTVLTPDGTEAEADVIENEDGTYDIFYTAAKPGTYVIYVRFGGVDIPNSPFTVMATDGEVTAVEEAPVNACPPGFRPWVTEEAYVPVSDMNGLGFKPFDLVIPFAVRKGEITGEVHMPSGKTATPEIVDNKDGTVTVRYAPTEVGLHEMHIKYMGSHIPESPLQFYVNYPNSGSVSAYGPGLVYGVANKTATFTIVTEDAGEGGLDLAIEGPSKAEISCIDNKDGTCTVTYLPTLPGDYSILVKYNDKHIPGSPFTAKITDDSRRCSQVKLGSAADFLLDISETDLSSLTASIKAPSGRDEPCLLKRLPNNHIGISFIPREVGEHLVSIKKNGNHVANSPVSIMVVQSEIGDARRAKVYGRGLSEGRTFEMSDFIVDTRDAGYGGISLAVEGPSKVDIQTEDLEDGTCKVSYFPTVPGVYIVSTKFADEHVPGSPFTVKISGEGRVKESITRTSRAPSVATVGSICDLNLKIPEINSSDMSAHVTSPSGRVTEAEIVPMGKNSHCVRFVPQEMGVHTVSVKYRGQHVTGSPFQFTVGPLGEGGAHKVRAGGPGLERGEAGVPAEFSIWTREAGAGGLSIAVEGPSKAEITFDDHKNGSCGVSYIAQEPGNYEVSIKFNDEHIPESPYLVPVIAPSDDARRLTVMSLQESGLKVNQPASFAIRLNGAKGKIDAKVHSPSGAVEECHVSELEPDKYAVRFIPHENGVHTIDVKFNGSHVVGSPFKVRVGEPGQAGNPALVSAYGTGLEGGTTGIQSEFFINTTRAGPGTLSVTIEGPSKVKMDCQETPEGYKVMYTPMAPGNYLISVKYGGPNHIVGSPFKAKVTGQRLVSPGSANETSSILVESVTRSSTETCYSAIPKASSDASKVTSKGAGLSKAFVGQKSSFLVDCSKAGSNMLLIGVHGPTTPCEEVSMKHVGNQQYNVTYVVKERGDYVLAVKWGEEHIPGSPFHVTVP

SEQ ID NO: 193 - DNA, 2440 bp, homo sapiens
ggccgggcggatcgctgcctgcagggagtcggggatgccaggttccagctgagcagcggccgcccgccagagtgccagtggctccttggaggtcgagtccaaggacgtggcttgaagccgggagctggggcgccggagtccacgcaccggggatggaggcgctgggtgacctggagggaccacgcgcaccaggaggtgatgatcctgcaggaagtgcaggagagacccccgggtggctttcgagagaacaggtttttgtactgatatcggcagcttcggtgaacttaggttccatgatgtgctattctatacttggaccgtttttccccaaagaggctgaaaagaagggagccagcaatacaattatcggtatgatctttggatgttttgctttgttcgagttgctggcatccttggtatttggaaactatcttgtacatattggagcaaaatttatgtttgtagcaggaatgtttgtctcaggaggagttacaattctctttggtgtattggaccgagttccagatgggccagtatttattgctatgtgttttctagtgagagtaatggatgcagttagctttgctgcagcaatgactgcatcttcttctatcctggcaaaggcttttccaaataacgtggctacggtattgggaagtcttgagactttttctggactggggctaatactaggtcctcctgtaggtggctttttgtatcaatcctttggctatgaagtgccttttattgttctgggatgcgtcgttttgctgatggtaccactcaatatgtatattttacccaattacgagtctgatccaggtgaacactcattctggaaactgatcgctttacccaaagttggccttatagccttcgtcatcaactcactcagctcgtgttttggcttcctcgatcctactctgtctctctttgttttggagaagttcaatttaccagctggatatgtgggactagtattcctgggtatggcactgtcctatgccatctcttcaccactatttggtctcctaagtgataaaaggccacctctaaggaaatggcttctggtgtttggcaacttaatcacagccgggtgctacatgctcttagggcctgtcccaatcttgcatattaaaagtcagctctggctgctggtgctgatattagttgtaagtggcctctctgctggaatgagtataattccaactttcccggaaattctcagttgtgcacatgaaaatgggtttgaagagggattaagtacattgggacttgtatcaggtctttttagtgcaatgtggtcaattggtgcttttatgggaccaacgctgggtggatttctgtatgagaaaattggttttgaatgggcagcagctatacaaggtctatgggctctgataagtggattagccatgggcttgttttatctactggagtattcaaggagaaaaaggtctaaatctcaaaacatcctcagcacagaggaggaacgaactactctcttgcctaatgaaacctagtccgatggatcctggattgatacaaggttgagaaatgaatgctcctggccttaaacatcaccgtaggaagggtttttaaaattttacgcgcaaaactccgtggaccccgtgccagtgtcttggaagtgtcaacgtgtttttggatgatcctgtattgggctgtacttactgtgatactgaaaagctgtcctgctgaagcagctatatttgaaatattaagtatgaaaggagtaattaaaaacaagcaaaacaaaacaagacttagtttttaaatgaccaaacttgtccttaaagatgttgttattaactcgagttagttcttatttcctctgtttattttttattctaagtacactgattctgtgaatgtaccttttttattaacagggaaagaaatgaattaatttgatatgctctaaatacataaaggtgcttcaaaatatgtagaaacattactatgaaatcagtttttaaaagatatactttctctttgtcctgaggtttttcggtcttgttcaaaaggaagaattcttgcctgccatacagaaactctctagcactccctgaccttaagcttttctaaaaattctgtttgtgtgaaaagtacaagaataacaatacttacaacttccatttttgtaacctacgttcacttatgatctggatttataaacattacttggtataacgtttttcatttcctttaatgtctctgttttttggctctaccatctgttttgtttttgtttttatctatatcttggtagatgtatttcatccctagagcaggtcagcctccttcccctaatgcgaatgcttgttttgttagggaagggcttcctccaacttcgtgtgaaattgtgatgttgaagtgaataaatgtctattgtgtaactctcatgaaaaaaaaaaaaaaa

SEQ ID NO: 194 - protein, 456 aa, homo sapiens
MEALGDLEGPRAPGGDDPAGSAGETPGWLSREQVFVLISAASVNLGSMMCYSILGPFFPKEAEKKGASNTIIGMIFGCFALFELLASLVFGNYLVHIGAKFMFVAGMFVSGGVTILFGVLDRVPDGPVFIAMCFLVRVMDAVSFAAAMTASSSILAKAFPNNVATVLGSLETFSGLGLILGPPVGGFLYQSFGYEVPFIVLGCVVLLMVPLNMYILPNYESDPGEHSFWKLIALPKVGLIAFVINSLSSCFGFLDPTLSLFVLEKFNLPAGYVGLVFLGMALSYAISSPLFGLLSDKRPPLRKWLLVFGNLITAGCYMLLGPVPILHIKSQLWLLVLILVVSGLSAGMSIIPTFPEILSCAHENGFEEGLSTLGLVSGLFSAMWSIGAFMGPTLGGFLYEKIGFEWAAAIQGLWALISGLAMGLFYLLEYSRRKRSKSQNILSTEEERTTLLPNET

SEQ ID NO: 195 - DNA, 2664 bp, homo sapiens
gctatctgaggaagttctggtagagagaagagctcaagagcatgggcagagtcagctcctgagtgggctgaacgctcccctcagctcctgcagtgctaattaagggagggagcagcggggagcttgcagtgaccaagagggtgttgaggctaggaggccacgataaacaggatacgataaaagtccttaaccaagacgcagatgggaagaagcgttagagcgagcagcactcacatctcaagaaccagcctttcaaacagtttccagagatggattatcctactttacttttggctcttcttcatgtatacagagctctatgtgaagaggtgctttggcatacatcagttccctttgccgagaacatgtctctagaatgtgtgtatccatcaatgggcatcttaacacaggtggagtggttcaagatcgggacccagcaggattccatagccattttcagccctactcatggcatggtcataaggaagccctatgctgagagggtttactttttgaattcaacgatggcttccaataacatgactcttttctttcggaatgcctctgaagatgatgttggctactattcctgctctctttacacttacccacagggaacttggcagaaggtgatacaggtggttcagtcagatagttttgaggcagctgtgccatcaaatagccacattgtttcggaacctggaaagaatgtcacactcacttgtcagcctcagatgacgtggcctgtgcaggcagtgaggtgggaaaagatccagccccgtcagatcgacctcttaacttactgcaacttggtccatggcagaaatttcacctccaagttcccaagacaaatagtgagcaactgcagccacggaaggtggagcgtcatcgtcatccccgatgtcacagtctcagactcggggctttaccgctgctacttgcaggccagcgcaggagaaaacgaaaccttcgtgatgagattgactgtagccgagggtaaaaccgataaccaatataccctctttgtggctggagggacagttttattgttgttgtttgttatctcaattaccaccatcattgtcattttccttaacagaaggagaaggagagagagaagagatctatttacagagtcctgggatacacagaaggcacccaataactatagaagtcccatctctaccagtcaacctaccaatcaatccatggatgatacaagagaggatatttatgtcaactatccaaccttctctcgcagaccaaagactagagtttaagcttattcttgacatgagtgcattagtaatgactcttatgtactcatgcatggatctttatgcaatttttttccactacccaaggtctaccttagatactagttgtctgaattgagttactttgataggaaaaatacttcattacctaaaatcatttttcatagaactgtttcagaaaacctgactctaactggtttatatacaaaagaaaacttactgtatcatataacagaatgatccaggggagattaagctttgggcaagggctatttaccagggcttaaatgttgtgtctagaattaagtatgggcataaactggcttctgaatccctttccagagtgttggatccatttccctggtcttggcctcactctcatgcaggctttcctcttgtgttggcaagatggctgccaactcttggcaattcatacatccttgtttctgtctggtagagagtttgcttctcaaatggagcaaacaaatttgattattttttcattgttaaataggcaacatgaccagaaaggatggaatggcttaagtaaactaagggttcacttctagagctgagaagcagggtcaaagcacaatactgggcaattcagagcatggttagaagaggaaaggggagtctcaaagctggagagtttaccaacaaatattgactgcagtgattaaccaagacatttttgttaactaaaaagtgaaatatgggatggattctagaaatggggtatctctgtccatacttctagaatccactctatcagcatagtccagaagaatacctggcagtagaagaaatgaatattcaagaggaagataaatgcgagagggcaatcctttactattctcatatttatttatctctcattctgtatagaattcttgccgccatcccaggtctagccttaggagcaaatgtagtagatagtcgaataataaataacttaatgttttggacatattttgtctacttttgagaattatttttaatatgtaaattctctcaaaagggtcaggcacctagttattattttttaatgattatgtgaaagttgaatataatataccactaaaagtgacagttgaaagtggtggcataggatggtagggtagaaatttgggagggaaaaaagaaattgggagggtacaggcaacaggagaaaggaatcaaaccacagaaaaatacaaagggaaacttctgcttcactattcagacaaagacagccctaatgacatcaccaacagtcaaagcaattagagaccatacctaatattgtttaaattctagatgtaggctaacaatgaaaagtatttgccaaactgaataaaactgtcatggttaccttgaaaaaaaaaaaaaaaaaaaaaaaaaaaaa

SEQ ID NO: 196 - protein, 336 aa, homo sapiens
MDYPTLLLALLHVYRALCEEVLWHTSVPFAENMSLECVYPSMGILTQVEWFKIGTQQDSIAIFSPTHGMVIRKPYAERVYFLNSTMASNNMTLFFRNASEDDVGYYSCSLYTYPQGTWQKVIQVVQSDSFEAAVPSNSHIVSEPGKNVTLTCQPQMTWPVQAVRWEKIQPRQIDLLTYCNLVHGRNFTSKFPRQIVSNCSHGRWSVIVIPDVTVSDSGLYRCYLQASAGENETFVMRLTVAEGKTDNQYTLFVAGGTVLLLLFVISITTIIVIFLNRRRRRERRDLFTESWDTQKAPNNYRSPISTSQPTNQSMDDTREDIYVNYPTFSRRPKTRV

SEQ ID NO: 197 - DNA, 4220 bp, homo sapiens
tggcggtcttgcaggcgggcggaccctcggccgcgctcggggctccggcgccgccgctcctcctgctcggcctgagctgcccgggctcggcgcgcgcttggggcgaggctcggcgggcgcggacgcgcagcatggcggtggaggacgaggggctccgggtcttccagagcgtgaagatcaagatcggtgaagccaaaaaccttccctcttacccggggccgagcaagatgagggattgctactgcacggtgaacctggaccaggaggaggttttcaggaccaaaattgtggaaaagtcactctgcccgttttacggagaagacttttactgtgaaattcctcggagctttcgtcacctgtccttctacattttcgatagagacgttttccggagggattccatcatagggaaggtggccatccagaaggaggacttgcagaagtaccacaacagggacacctggttccagctgcagcacgtggacgctgactcggaagtgcagggcaaagtgcacctggagctgcggctgagcgaggtcatcacagacactggggtcgtctgccacaagctcgccacacgcatcgtcgagtgccagggcctccccatcgtgaatgggcaatgtgacccctacgccaccgtgacgctggcaggacccttcagatcagaagcaaagaagacgaaagtgaagaggaagaccaacaatccccagttcgatgaagtgttttattttgaggtgacccggccctgtagctacagcaagaagtcccactttgactttgaggaggaagacgtggacaagctcgaaatcagagttgacctctggaatgccagtaacctgaagtttggagatgaattcctgggagaactaaggatcccgttgaaagtcctgcggcagtccagctcctacgaggcgtggtacttcctccagccccgggacaatggtagcaagagcctaaagccagacgacctgggctccctgcggctgaacgtggtatacacggaagaccacgtgttttcttctgactattacagccctctgcgggacctgctgttgaagtctgcggatgtggagcccgtgtcagcgtctgcggcccacatcctgggcgaggtttgccgggagaagcaggaggcggccgtcccgctggtgcggctcttcctacactatggcagggtggtgccattcatcagtgccatcgccagcgcggaggtgaagcggacccaggaccccaacaccatcttccgaggaaactcactggcgtccaagtgcatcgacgagaccatgaagctggcggggatgcattacctgcatgtcaccctgaagcccgccatcgaggagatatgccagagccacaaaccctgtgaaatcgaccctgtgaagttgaaagacggagaaaaccttgaaaacaacatggagaacctacggcagtatgtggaccgcgtcttccacgccatcactgagtctggggtgagctgcccgaccgtcatgtgtgacatcttcttctccctccgggaggcggcggccaagcgcttccaggatgacccggacgtcaggtacactgcagtgagcagcttcatcttcctgaggttctttgcgcccgccattctctcccccaacctcttccagctcacgccgcaccacacggacccccagacgtccaggacgctgacattgatctccaagaccgttcagaccctcggcagcctgtccaagtccaaatctgcgagttttaaggagtcctacatggctacattttatgaattcttcaatgagcagaaatatgctgatgcggtgaagaacttcttggatctgatttcgtcctcggggagaagagaccccaagagtgttgagcagcccatcgtgcttaaagaagggttcatgatcaagagggcccaaggacggaagcgctttgggatgaagaattttaagaagagatggtttcgcttgaccaaccatgaatttacctaccacaaaagcaaaggggaccagcctctctacagcattcccatcgagaacatcctggcagtggagaagctggaggaggagtctttcaaaatgaaaaacatgttccaggtcatccagccagagcgtgcgctgtacatccaggccaacaactgcgtggaggccaaggactggatcgacattctcaccaaagtgagccagtgcaaccagaagcgcctcaccgtctaccacccgtccgcctacctgagcggccactggctgtgctgtagggcgccatccgactcggctccgggctgctcgccctgcactggcggcctcccagccaacatccagctggacattgatggggaccgtgagacggagcgtatctactccctcttcaacttgtacatgagcaagctggagaagatgcaggaggcctgtgggagcaaatctgtgtatgacggcccggagcaggaggagtattcgacgttcgtcattgacgacccccaggagacctacaagacgctaaagcaagtcatcgctggggttggggctttggagcaggagcacgcccagtataagagggacaagttcaagaagacgaaatatggaagccaggagcaccccatcggagacaagagcttccagaactacatccggcagcagtccgagacctccactcattccatttaaagtctgcgggacgcgcccagtggcgccagcaagctgcccatgcaaagccgcagcctttgggagggagaagagaaggaagagcgcagagccggcaaagtgagatgcacgccgtcccggcccatagacaagtggcgctggggtttccctctcccagaaccgctgccaccaccgccacgccctccgcagaaagcccacctggccctgtggaacgtgtcgtcatttgattctgtgctttttgctccttgtttgtggggatctggggatcagctgaaggatcaggaagtgtgggctgtgccctagccacaccacagccagcctcagggagccacggcccgtctagtcgactgtgacatgcacctccggccgtgtgtgcgtcagtctcgtgcacgtctgtcttgcgtgcacggtgcgtgtgacgctgggctctgtggctctgtgcccgggaggcctgctggccccgcctcggctttcggcttcatcacattgggaggttcagagcattactctcccactgtgcctgccatccaggcagccatgggaggcggcctccctgttccactttcgaggttcgtttgattcctggctgaggggtcagttttatggctgggaggtgcagaattacacagaagtcccagtctgaggatgtccttggtgcttgggggatacgggttctgtccacagagtcccttggagggaaaggtgtgggctccagcttctccaggcgtctgcggagcccacagttgaagcccacatcgttttgctgttgaatggggtttaaaatcagaattaacatttgccaccccccgtggaagtttgaagattttaaaaatagaaatgtacatttttcaagctgtttttctttatgtttttgaaggaccatttttaattagctctttgatacaaagtaactcagaacgtcaaaacctatacccactaaagggaaggctgccgggaaggcaaatggaacaggaatggagcctgtctcaggaaggccagctgcaggtcctccagaaaatcaaagaagggaagaaactctgagtttgaggtacaggggcttcggggtgcagacgtccctccagggcccatggtcagtattgcacctgtgttatgaacccccagatgctgtgcagggcaggggcgggggctgctgttttattggggaggggagcatcctaaaaatggggtccaggcagacccctccagacctcacactgccgaggaggcctttcccaaagggcgtcctcccgggatgcagacggcaggtgtgtgggaagcgccgtttaaatacacagcacgacgtatccttgtaccgacttctcccggttcttgtttgaaaatactgtagttcaggctcttgatctagatggcagataggaactttcttgtcacaaaaatactggaggaaaatgttgtaaaaatagacttttggacacacagctgttggggctgcactgagctgcaatttttaacatggatttataacttaatgtttctgtttataaaatactaatgatttgcaatgtattttactggccaattaaaacagatgttttattctttctgaaaaaaaaaaaaaaaaaaaaa

SEQ ID NO: 198 - protein, 834 aa, homo sapiens
MAVEDEGLRVFQSVKIKIGEAKNLPSYPGPSKMRDCYCTVNLDQEEVFRTKIVEKSLCPFYGEDFYCEIPRSFRHLSFYIFDRDVFRRDSIIGKVAIQKEDLQKYHNRDTWFQLQHVDADSEVQGKVHLELRLSEVITDTGVVCHKLATRIVECQGLPIVNGQCDPYATVTLAGPFRSEAKKTKVKRKTNNPQFDEVFYFEVTRPCSYSKKSHFDFEEEDVDKLEIRVDLWNASNLKFGDEFLGELRIPLKVLRQSSSYEAWYFLQPRDNGSKSLKPDDLGSLRLNVVYTEDHVFSSDYYSPLRDLLLKSADVEPVSASAAHILGEVCREKQEAAVPLVRLFLHYGRVVPFISAIASAEVKRTQDPNTIFRGNSLASKCIDETMKLAGMHYLHVTLKPAIEEICQSHKPCEIDPVKLKDGENLENNMENLRQYVDRVFHAITESGVSCPTVMCDIFFSLREAAAKRFQDDPDVRYTAVSSFIFLRFFAPAILSPNLFQLTPHHTDPQTSRTLTLISKTVQTLGSLSKSKSASFKESYMATFYEFFNEQKYADAVKNFLDLISSSGRRDPKSVEQPIVLKEGFMIKRAQGRKRFGMKNFKKRWFRLTNHEFTYHKSKGDQPLYSIPIENILAVEKLEEESFKMKNMFQVIQPERALYIQANNCVEAKDWIDILTKVSQCNQKRLTVYHPSAYLSGHWLCCRAPSDSAPGCSPCTGGLPANIQLDIDGDRETERIYSLFNLYMSKLEKMQEACGSKSVYDGPEQEEYSTFVIDDPQETYKTLKQVIAGVGALEQEHAQYKRDKFKKTKYGSQEHPIGDKSFQNYIRQQSETSTHSI

SEQ ID NO: 199 - DNA, 3691 bp, homo sapiens
ggcgcaacgctgagcagctggcgcgtcccgcgcggccccagttctgcgcagcttcccgaggctccgcaccagccgcgcttctgtccgcctgcagggcattccagaaagatgaggatatttgctgtctttatattcatgacctactggcatttgctgaacgcatttactgtcacggttcccaaggacctatatgtggtagagtatggtagcaatatgacaattgaatgcaaattcccagtagaaaaacaattagacctggctgcactaattgtctattgggaaatggaggataagaacattattcaatttgtgcatggagaggaagacctgaaggttcagcatagtagctacagacagagggcccggctgttgaaggaccagctctccctgggaaatgctgcacttcagatcacagatgtgaaattgcaggatgcaggggtgtaccgctgcatgatcagctatggtggtgccgactacaagcgaattactgtgaaagtcaatgccccatacaacaaaatcaaccaaagaattttggttgtggatccagtcacctctgaacatgaactgacatgtcaggctgagggctaccccaaggccgaagtcatctggacaagcagtgaccatcaagtcctgagtggtaagaccaccaccaccaattccaagagagaggagaagcttttcaatgtgaccagcacactgagaatcaacacaacaactaatgagattttctactgcacttttaggagattagatcctgaggaaaaccatacagctgaattggtcatcccagaactacctctggcacatcctccaaatgaaaggactcacttggtaattctgggagccatcttattatgccttggtgtagcactgacattcatcttccgtttaagaaaagggagaatgatggatgtgaaaaaatgtggcatccaagatacaaactcaaagaagcaaagtgatacacatttggaggagacgtaatccagcattggaacttctgatcttcaagcagggattctcaacctgtggtttaggggttcatcggggctgagcgtgacaagaggaaggaatgggcccgtgggatgcaggcaatgtgggacttaaaaggcccaagcactgaaaatggaacctggcgaaagcagaggaggagaatgaagaaagatggagtcaaacagggagcctggagggagaccttgatactttcaaatgcctgaggggctcatcgacgcctgtgacagggagaaaggatacttctgaacaaggagcctccaagcaaatcatccattgctcatcctaggaagacgggttgagaatccctaatttgagggtcagttcctgcagaagtgccctttgcctccactcaatgcctcaatttgttttctgcatgactgagagtctcagtgttggaacgggacagtatttatgtatgagtttttcctatttattttgagtctgtgaggtcttcttgtcatgtgagtgtggttgtgaatgatttcttttgaagatatattgtagtagatgttacaattttgtcgccaaactaaacttgctgcttaatgatttgctcacatctagtaaaacatggagtatttgtaaggtgcttggtctcctctataactacaagtatacattggaagcataaagatcaaaccgttggttgcataggatgtcacctttatttaacccattaatactctggttgacctaatcttattctcagacctcaagtgtctgtgcagtatctgttccatttaaatatcagctttacaattatgtggtagcctacacacataatctcatttcatcgctgtaaccaccctgttgtgataaccactattattttacccatcgtacagctgaggaagcaaacagattaagtaacttgcccaaaccagtaaatagcagacctcagactgccacccactgtccttttataatacaatttacagctatattttactttaagcaattcttttattcaaaaaccatttattaagtgcccttgcaatatcaatcgctgtgccaggcattgaatctacagatgtgagcaagacaaagtacctgtcctcaaggagctcatagtataatgaggagattaacaagaaaatgtattattacaatttagtccagtgtcatagcataaggatgatgcgaggggaaaacccgagcagtgttgccaagaggaggaaataggccaatgtggtctgggacggttggatatacttaaacatcttaataatcagagtaattttcatttacaaagagaggtcggtacttaaaataaccctgaaaaataacactggaattccttttctagcattatatttattcctgatttgcctttgccatataatctaatgcttgtttatatagtgtctggtattgtttaacagttctgtcttttctatttaaatgccactaaattttaaattcatacctttccatgattcaaaattcaaaagatcccatgggagatggttggaaaatctccacttcatcctccaagccattcaagtttcctttccagaagcaactgctactgcctttcattcatatgttcttctaaagatagtctacatttggaaatgtatgttaaaagcacgtatttttaaaatttttttcctaaatagtaacacattgtatgtctgctgtgtactttgctatttttatttattttagtgtttcttatatagcagatggaatgaatttgaagttcccagggctgaggatccatgccttctttgtttctaagttatctttcccatagcttttcattatctttcatatgatccagtatatgttaaatatgtcctacatatacatttagacaaccaccatttgttaagtatttgctctaggacagagtttggatttgtttatgtttgctcaaaaggagacccatgggctctccagggtgcactgagtcaatctagtcctaaaaagcaatcttattattaactctgtatgacagaatcatgtctggaacttttgttttctgctttctgtcaagtataaacttcactttgatgctgtacttgcaaaatcacattttctttctggaaattccggcagtgtaccttgactgctagctaccctgtgccagaaaagcctcattcgttgtgcttgaacccttgaatgccaccagctgtcatcactacacagccctcctaagaggcttcctggaggtttcgagattcagatgccctgggagatcccagagtttcctttccctcttggccatattctggtgtcaatgacaaggagtaccttggctttgccacatgtcaaggctgaagaaacagtgtctccaacagagctccttgtgttatctgtttgtacatgtgcatttgtacagtaattggtgtgacagtgttctttgtgtgaattacaggcaagaattgtggctgagcaaggcacatagtctactcagtctattcctaagtcctaactcctccttgtggtgttggatttgtaaggcactttatcccttttgtctcatgtttcatcgtaaatggcataggcagagatgatacctaattctgcatttgattgtcactttttgtacctgcattaatttaataaaatattcttatttattttgttacttggtacaccagcatgtccattttcttgtttattttgtgtttaataaaatgttcagtttaacatcccagtggagaaagttaaaaaa

SEQ ID NO: 200 - protein, 290 aa, homo sapiens
MRIFAVFIFMTYWHLLNAFTVTVPKDLYVVEYGSNMTIECKFPVEKQLDLAALIVYWEMEDKNIIQFVHGEEDLKVQHSSYRQRARLLKDQLSLGNAALQITDVKLQDAGVYRCMISYGGADYKRITVKVNAPYNKINQRILVVDPVTSEHELTCQAEGYPKAEVIWTSSDHQVLSGKTTTTNSKREEKLFNVTSTLRINTTTNEIFYCTFRRLDPEENHTAELVIPELPLAHPPNERTHLVILGAILLCLGVALTFIFRLRKGRMMDVKKCGIQDTNSKKQSDTHLEET

SEQ ID NO: 201 - DNA, 4900 bp, homo sapiens
taaagtcatcaaaacaacgttatatcctgtgtgaaatgctgcagtcaggatgccttgtggtttgagtgccttgatcatgtgccctaaggggatggtggcggtggtggtggccgtggatgacggagactctcaggccttggcaggtgcgtctttcagttcccctcacacttcgggttcctcggggaggaggggctggaaccctagcccatcgtcaggacaaagatgctcaggctgctcttggctctcaacttattcccttcaattcaagtaacaggaaacaagattttggtgaagcagtcgcccatgcttgtagcgtacgacaatgcggtcaaccttagctgcaagtattcctacaatctcttctcaagggagttccgggcatcccttcacaaaggactggatagtgctgtggaagtctgtgttgtatatgggaattactcccagcagcttcaggtttactcaaaaacggggttcaactgtgatgggaaattgggcaatgaatcagtgacattctacctccagaatttgtatgttaaccaaacagatatttacttctgcaaaattgaagttatgtatcctcctccttacctagacaatgagaagagcaatggaaccattatccatgtgaaagggaaacacctttgtccaagtcccctatttcccggaccttctaagcccttttgggtgctggtggtggttggtggagtcctggcttgctatagcttgctagtaacagtggcctttattattttctgggtgaggagtaagaggagcaggctcctgcacagtgactacatgaacatgactccccgccgccccgggcccacccgcaagcattaccagccctatgccccaccacgcgacttcgcagcctatcgctcctgacacggacgcctatccagaagccagccggctggcagcccccatctgctcaatatcactgctctggataggaaatgaccgccatctccagccggccacctcaggcccctgttgggccaccaatgccaatttttctcgagtgactagaccaaatatcaagatcattttgagactctgaaatgaagtaaaagagatttcctgtgacaggccaagtcttacagtgccatggcccacattccaacttaccatgtacttagtgacttgactgagaagttagggtagaaaacaaaaagggagtggattctgggagcctcttccctttctcactcacctgcacatctcagtcaagcaaagtgtggtatccacagacattttagttgcagaagaaaggctaggaaatcattccttttggttaaatgggtgtttaatcttttggttagtgggttaaacggggtaagttagagtagggggagggataggaagacatatttaaaaaccattaaaacactgtctcccactcatgaaatgagccacgtagttcctatttaatgctgttttcctttagtttagaaatacatagacattgtcttttatgaattctgatcatatttagtcattttgaccaaatgagggatttggtcaaatgagggattccctcaaagcaatatcaggtaaaccaagttgctttcctcactccctgtcatgagacttcagtgttaatgttcacaatatactttcgaaagaataaaatagttctcctacatgaagaaagaatatgtcaggaaataaggtcactttatgtcaaaattatttgagtactatgggacctggcgcagtggctcatgcttgtaatcccagcactttgggaggccgaggtgggcagatcacttgagatcaggaccagcctggtcaagatggtgaaactccgtctgtactaaaaatacaaaatttagcttggcctggtggcaggcacctgtaatcccagctgcccaagaggctgaggcatgagaatcgcttgaacctggcaggcggaggttgcagtgagccgagatagtgccacagctctccagcctgggcgacagagtgagactccatctcaaacaacaacaacaacaacaacaacaacaacaaaccacaaaattatttgagtactgtgaaggattatttgtctaacagttcattccaatcagaccaggtaggagctttcctgtttcatatgtttcagggttgcacagttggtctctttaatgtcggtgtggagatccaaagtgggttgtggaaagagcgtccataggagaagtgagaatactgtgaaaaagggatgttagcattcattagagtatgaggatgagtcccaagaaggttctttggaaggaggacgaatagaatggagtaatgaaattcttgccatgtgctgaggagatagccagcattaggtgacaatcttccagaagtggtcaggcagaaggtgccctggtgagagctcctttacagggactttatgtggtttagggctcagagctccaaaactctgggctcagctgctcctgtaccttggaggtccattcacatgggaaagtattttggaatgtgtcttttgaagagagcatcagagttcttaagggactgggtaaggcctgaccctgaaatgaccatggatatttttctacctacagtttgagtcaactagaatatgcctggggaccttgaagaatggcccttcagtggccctcaccatttgttcatgcttcagttaattcaggtgttgaaggagcttaggttttagaggcacgtagacttggttcaagtctcgttagtagttgaatagcctcaggcaagtcactgcccacctaagatgatggttcttcaactataaaatggagataatggttacaaatgtctcttcctatagtataatctccataagggcatggcccaagtctgtctttgactctgcctatccctgacatttagtagcatgcccgacatacaatgttagctattggtattattgccatatagataaattatgtataaaaattaaactgggcaatagcctaagaaggggggaatattgtaacacaaatttaaacccactacgcagggatgaggtgctataatatgaggaccttttaacttccatcattttcctgtttcttgaaatagtttatcttgtaatgaaatataaggcacctcccacttttatgtatagaaagaggtcttttaatttttttttaatgtgagaaggaagggaggagtaggaatcttgagattccagatcgaaaatactgtactttggttgatttttaagtgggcttccattccatggatttaatcagtcccaagaagatcaaactcagcagtacttgggtgctgaagaactgttggatttaccctggcacgtgtgccacttgccagcttcttgggcacacagagttcttcaatccaagttatcagattgtatttgaaaatgacagagctggagagttttttgaaatggcagtggcaaataaataaatacttttttttaaatggaaagacttgatctatggtaataaatgattttgttttctgactggaaaaataggcctactaaagatgaatcacacttgagatgtttcttactcactctgcacagaaacaaagaagaaatgttatacagggaagtccgttttcactattagtatgaaccaagaaatggttcaaaaacagtggtaggagcaatgctttcatagtttcagatatggtagttatgaagaaaacaatgtcatttgctgctattattgtaagagtcttataattaatggtactcctataatttttgattgtgagctcacctatttgggttaagcatgccaatttaaagagaccaagtgtatgtacattatgttctacatattcagtgataaaattactaaactactatatgtctgctttaaatttgtactttaatattgtcttttggtattaagaaagatatgctttcagaatagatatgcttcgctttggcaaggaatttggatagaacttgctatttaaaagaggtgtggggtaaatccttgtataaatctccagtttagccttttttgaaaaagctagactttcaaatactaatttcacttcaagcagggtacgtttctggtttgtttgcttgacttcagtcacaatttcttatcagaccaatggctgacctctttgagatgtcaggctaggcttacctatgtgttctgtgtcatgtgaatgctgagaagtttgacagagatccaacttcagccttgaccccatcagtccctcgggttaactaactgagccaccggtcctcatggctattttaatgagggtattgatggttaaatgcatgtctgatcccttatcccagccatttgcactgccagctgggaactataccagacctggatactgatcccaaagtgttaaattcaactacatgctggagattagagatggtgccaataaaggacccagaaccaggatcttgattgctatagacttattaataatccaggtcaaagagagtgacacacactctctcaagacctggggtgagggagtctgtgttatctgcaaggccatttgaggctcagaaagtctctctttcctatagatatatgcatactttctgacatataggaatgtatcaggaatactcaaccatcacaggcatgttcctacctcagggcctttacatgtcctgtttactctgtctagaatgtccttctgtagatgacctggcttgcctcgtcacccttcaggtccttgctcaagtgtcatcttctcccctagttaaactaccccacaccctgtctgctttccttgcttatttttctccatagcattttaccatctcttacattagacatttttcttatttatttgtagtttataagcttcatgaggcaagtaactttgctttgtttcttgctgtatctccagtgcccagagcagtgcctggtatataataaatatttattgactgagtgaaaaaaaaaaaaaaaaa

SEQ ID NO: 202 - protein, 219 aa, homo sapiens
LRLLLALNLFPSIQVTGNKILVKQSPMLVAYDNAVNLSCKYSYNLFSREFRASLHKGLDSAVEVCVVYGNYSQQLQVYSKTGFNCDGKLGNESVTFYLQNLYVNQTDIYFCKIEVMYPPPYLDNEKSNGTIIHVKGKHLCPSPLFPGPSKPFWVLVVVGGVLACYSLLVTVAFIIFWVRSKRSRLLHSDYMNMTPRRPGPTRKHYQPYAPPRDFAAYRS

SEQ ID NO: 203 - DNA, 11994 bp, homo sapiens
cgccaggtcgcgcacagcgccccgagcccaggcgcctccccgcccccctcccgcgctccgcggcggcggcggcggcggcagcagtagcagcaatatggctgttgatgggtgtttggggtggcgctggcggcgggaggagctcccccgagcccctgcgccggctgcccgttgctagctatggcaaatggtggcggcggcggcggcggcagcagcggcggcggcggcggcggcggaggcagcagtcttagaatgagtagcaatatccacgcgaaccatctcagcctagacgcgtcctcctcctcctcctcctcctcttcctcttcttcttcttcctcctcctcttcctcctcgtcctcggtccacgagcccaagatggatgcgctcatcatcccggtgaccatggaggtgccgtgcgacagccggggccaacgcatgtggtgggctttcctggcctcctccatggtgactttcttcgggggcctcttcatcatcttgctctggcggacgctcaagtacctgtggaccgtgtgctgccactgcgggggcaagacgaaggaggcccagaagattaacaatggctcaagccaggcggatggcactctcaaaccagtggatgaaaaagaggaggcagtggccgccgaggtcggctggatgacctccgtgaaggactgggcgggggtgatgatatccgcccagacactgactggcagagtcctggttgtcttagtctttgctctcagcatcggtgcacttgtaatatacttcatagattcatcaaacccaatagaatcctgccagaatttctacaaagatttcacattacagatcgacatggctttcaacgtgttcttccttctctacttcggcttgcggtttattgcagccaacgataaattgtggttctggctggaagtgaactctgtagtggatttcttcacggtgccccccgtgtttgtgtctgtgtacttaaacagaagttggcttggtttgagatttttaagagctctgagactgatacagttttcagaaattttgcagtttctgaatattcttaaaacaagtaattccatcaagctggtgaatctgctctccatatttatcagcacgtggctgactgcagccgggttcatccatttggtggagaattcaggggacccatgggaaaatttccaaaacaaccaggctctcacctactgggaatgtgtctatttactcatggtcacaatgtccaccgttggttatggggatgtttatgcaaaaaccacacttgggcgcctcttcatggtcttcttcatcctcgggggactggccatgtttgccagctacgtccctgaaatcatagagttaataggaaaccgcaagaaatacgggggctcctatagtgcggttagtggaagaaagcacattgtggtctgcggacacatcactctggagagtgtttccaacttcctgaaggactttctgcacaaggaccgggatgacgtcaatgtggagatcgtttttcttcacaacatctcccccaacctggagcttgaagctctgttcaaacgacattttactcaggtggaattttatcagggttccgtcctcaatccacatgatcttgcaagagtcaagatagagtcagcagatgcatgcctgatccttgccaacaagtactgcgctgacccggatgcggaggatgcctcgaatatcatgagagtaatctccataaagaactaccatccgaagataagaatcatcactcaaatgctgcagtatcacaacaaggcccatctgctaaacatcccgagctggaattggaaagaaggtgatgacgcaatctgcctcgcagagttgaagttgggcttcatagcccagagctgcctggctcaaggcctctccaccatgcttgccaacctcttctccatgaggtcattcataaagattgaggaagacacatggcagaaatactacttggaaggagtctcaaatgaaatgtacacagaatatctctccagtgccttcgtgggtctgtccttccctactgtttgtgagctgtgttttgtgaagctcaagctcctaatgatagccattgagtacaagtctgccaaccgagagagccgaagccgaaagcgtatattaattaatcctggaaaccatcttaagatccaagaaggtactttaggatttttcatcgcaagtgatgccaaagaagttaaaagggcatttttttactgcaaggcctgtcatgatgacatcacagatcccaaaagaataaaaaaatgtggctgcaaacggcttgaagatgagcagccgtcaacactatcaccaaaaaaaaagcaacggaatggaggcatgcggaactcacccaacacctcgcctaagctgatgaggcatgaccccttgttaattcctggcaatgatcagattgacaacatggactccaatgtgaagaagtacgactctactgggatgtttcactggtgtgcacccaaggagatagagaaagtcatcctgactcgaagtgaagctgccatgaccgtcctgagtggccatgtcgtggtctgcatctttggcgacgtcagctcagccctgatcggcctccggaacctggtgatgccgctccgtgccagcaactttcattaccatgagctcaagcacattgtgtttgtgggctctattgagtacctcaagcgggaatgggagacgcttcataacttccccaaagtgtccatattgcctggtacgccattaagtcgggctgatttaagggctgtcaacatcaacctctgtgacatgtgcgttatcctgtcagccaatcagaataatattgatgatacttcgctgcaggacaaggaatgcatcttggcgtcactcaacatcaaatctatgcagtttgatgacagcatcggagtcttgcaggctaattcccaagggttcacacctccaggaatggatagatcctctccagataacagcccagtgcacgggatgttacgtcaaccatccatcacaactggggtcaacatccccatcatcactgaactagtgaacgatactaatgttcagtttttggaccaagacgatgatgatgaccctgatacagaactgtacctcacgcagccctttgcctgtgggacagcatttgccgtcagtgtcctggactcactcatgagcgcgacgtacttcaatgacaatatcctcaccctgatacggaccctggtgaccggaggagccacgccggagctggaggctctgattgctgaggaaaacgcccttagaggtggctacagcaccccgcagacactggccaatagggaccgctgccgcgtggcccagttagctctgctcgatgggccatttgcggacttaggggatggtggttgttatggtgatctgttctgcaaagctctgaaaacatataatatgctttgttttggaatttaccggctgagagatgctcacctcagcacccccagtcagtgcacaaagaggtatgtcatcaccaacccgccctatgagtttgagctcgtgccgacggacctgatcttctgcttaatgcagtttgaccacaatgccggccagtcccgggccagcctgtcccattcctcccactcgtcgcagtcctccagcaagaagagctcctctgttcactccatcccatccacagcaaaccgacagaaccggcccaagtccagggagtcccgggacaaacagaacagaaaagaaatggtttacagatgaaccggataatgcctatcccagaaacattcaaatcaagcccatgagtacccacatggctaaccagatcaaccaatataaatccacaagcagcttgattccaccaatcagagaagttgaagatgaatgttgactcccaggagaccagaactatttttttaaagcctgacaaacttcataaatggtgatgtgacttttcttcttacatgctgaatcactggtggaaacgttaggataagcaagaattgccagaaaataaagtagacagatctttctctttgtctgccttgaatattgcttccatgtattttggaaaagaaaatgatttcatttataaatgaacatactaaaatagtcatgtatagcctctagcattttaaattatttttatttattagaaagaaaatatattttttcttttcattgtcaaatatcttccctatatctaaacaatgcaaaatctaaatgaataagtggtcagactccttaatgtgtttttctcttctttctctctttttctttgaggagaatgatggtcaccaccacaattaattgtaattaagggaaatgaattattaaaacaattttaaaatggccaatgatgtatacatgtattttagtaaatccagaaaagaagactaaggggacaggtgaatacctgctcctcgcctggatgggtgtgtattttgatctgcattgacaccagctcttaataaatggaaacttatttattttcacagttgaaagtcatatttttgtagttctagttttcattctgtagttctcacccctttgttcatatttttaaagggaagaccttctgctgcttttctacaattggcagatcaggtttgtctggccaactaaggacaccaggagggttgtgggcacacctgggatgtggaagctgaggaccagatgcacacaaggcattgctctgtttgctgttctagtggtggagactcctacgtgctgttatgcttctcattttatatttccaaaccacctgagcgagtaatgtcaacttcgggagggtctggtggactttctccccactccccaagtctcagagcttttagcctggaagtttgtaaaactgattagtagttttactttaccataggatgtgagagggcagtcattcttctcactgagtttttgtttaaaaaccaggaaatttctacaatcatggagacagattttaatttgcatgctctcctttatttagttgctggggccaaacacatgaacttgttacaacaatttaaaaataataataacaaaaggaaagcaacgaatgcacttcatatagactgttagaaaaggcctttgaaaattaccagcagtgaaatcaaataaattagccactttaaactgcggtcaaaagatttttctagccatcagatgcaattacgatgtctcagagctctgctatcgcttgcatgctcggtgtacagtctcccggcaactgttttgttccaatcaacttagcaagtctttcaactttaaaattatcaatctttgatatgatcatcaaggtctctggagaagcatggatgtaatagtgatttctattttcttaaaaaatgtaaactgtggacacttaatggaaccaagctaaccaaagtatctccccgaagtttcatgatatctagtccattaactctttgggccatgacctgtggtacctagttatggtagtgcaaatcagatcagagcaaagcaatgagatcatcatgaagacatatgtccactaagtactccaattaccagcgtaggcaaaatgagcttccacctctgtccactccctgcagagccaatatagtcgtgcttccacctcgtaggcattgtcctgcagtgatttgtcggactgtggttactctgtcgtcacattttgtagaattagttctataaaagtattgtgaatacaatgtatgtccaattggattgtttaaaaactacttataattaatcactagcctactcagcagactaaaatgatgtcaacagtctatattcaggcttataaacatttcttggtttccaacagaagtcaaatgtgtttgtggggagaacgttttgctaggattttgacaactttcctgaaagctaggccttttttacataatgattttgcattggggtcaccttagtatattcacgtcaatccacgctcttctttccttcgtgaaccatagtgggctcttcactcctgctcgtaataaccacctccaaatttgttagagtgatttggtctcctctggcaggctgtggtggccacataaaggatcttccattagagggacacaggacacaaagctccattcccatgaccctctcttccctgtgtctcccctaacaaggcaatctggaagcagaaatgcaaactccagccccaccacacatccaccgatgcatttgtggctagaaattttaatctaaactttttttaaaaaaaatcataatagttaggatagtttcctatagcaaagggctccttgattcataagcacctcccccccaaaaaaaccaaattggtaaaaattcattttcttttaaatagagcaataagttcatactgtgttgccgttgtaataatgaattgttctggactagaaaacaaaatgaggcattttgttaagggggtaggaaaatgactgattgttgggccctttggcaaaagctggtgcctggtaagtagaaacgaaatggaaacagaaataacatttgtgaaatcactggagggctcaagcaaatgccagagcttctccctggcttgttcctacttgttgagctctttggccctgagtcccatccatctccactgcaacagtctgtctttctgcctacatccgcctgagaccaaggagggtctttggtacagtccacattatgaggctctgatttcctatcccagtttagggctccagaaaagccattctcccaaactaatgattcttgggtgctgtgggtcaccaacaggctgtttacaaagcagaaaatatcatcaccatcataacctttctccttgagaaaacttttatttttgtctaagcaattttatattttagaatatcatcttgaaccattataaaacaccttaaataaaagtgattgtgactaaggcacgttggagaacattccaatctttcctcccaagggttctggcaccttatgatgtactttgtaaaaaaattgattgaagattttaaataaacaggaaattagaagtgttagggttagataaaggaaaagtgaaaaagcataagaaatttgggactttttcatgttgaaaggagaaaaagcacaagttccctagttaccatttaatatgagggtgcaagagccacatttacaaacaacaaacttgatctttaaaaatgtttttaaaactctctgagtctcagtgacttcatttgtaaatgagagtgattcatctagatgactctaaggtctctttcaggtcccaggggacgtgatctaagttaggagtgggaacatgggagtggctgcttctccttggctaagcccatgcagactattgtgtccaggactggaataaaggtcctttttgctgcatcacccaggcaacactcccagccttactcaggagtggtgaacattttctgctctggacatagaataggtaggttcattcctggtcttttcactttagattctctttaggttcaagatgcagatttctcaatttggacacacctgcatcacgttggtcaaattttgctgcctgtttctagggttttcttctcagtttcatccctgccttcccttttttgttgttttttttttggttcaaggcccagcttcagttaatcccttcatctctatgccatgtctccaattcctagtatgtaactagaggttcaagagaccccaaattcctgccattttccccatttatgtttccccatgtgaatcttcaggaagtaaccagtcttccttctcacttcatttcctgtcctctgtttatttggttattttctttcattaataaactaaccatctcttagctacttacattcacaaatgtaattttaatctattgtgtttcattgtgaaagagaatctcattgaaggaaggaaggaagaaattgaggaataaaggtaggaagggagagaaacaaagactatccaaccaattgactgagatgtgagccggcttgactcctaggagactaagtagatccattcagcttgaacactgagttccagggcagaatctgtccattttctgttttgttcttacttgctgcttttggaatggtggtaaagccaccagtcaccatgagccttgaaaggaccttcactaatgaggacttgactcaccctctttaaaaagcaaaagaaacagaatttacttacaatcttctggtaaattacctttctgatcctctccttattcccaaaaggcaatttttttaatccagcagagatgatttagcatataaatcccaggtcatttgaggaggtgatgacgctatttggatttatttatgagacagtagtaattataaatgattcctaggcagtttgtactagtttggtcatattggttgtttaagtggagtctcttctgattgtttgtttccaataaagtatcagttgttaataatttcaagatttccataaaaataagaaaacttggaaaacatttttaattttatttcttaagagaccacagagcctaattttcaatttttatggtaagcttgcttaaaacatgtataaaaagaagcctacatgctcaaaggcagaggcacctttagccctacaacagttggaagctccatgatatcacagccccacatggatagattggagaaagaattctgacttagaccacctgtagcagaccttcctcttttggcatatttttttaatcacaaaaaggacctgagactccctatctaaagataagccaaacttggggtatacattaagaatctgggaagaaagaaaaaaaagaaaaagatataataagcagtattttaaaataccatgagttatgggcatgcatatggtacaaagagtagttctttgggttgaaagaaagaagagtttgcattgaactgcgtaggctggcaagaatgcagaggtatacaatgtttgatgggctttggaggcatttcaatagtaaatgggtgacaggactggaaagatgtggaatatgagggttttccagggagatgggacttaatgggccatgatgtatttgtaggaatgtgatttcaatagattgactattttgtctactgtgataagtttgtgtaggggaactgaggaaaactgagatgagacttcatggaaggggctacaaagtacagtctaaaggcctagataaagtttgaaacttgatttagaaagtcatgaaaagccactcagagttttaagcaaagagtgatggggcagcaatggctgtgcatttttcaggttgaaagtagtgagatgtcagttcttcctggaagatatcatgagaatgcacacaaaactgaacattttctcagcagcaaggagtgctaaagggtgcacactccaagtcaacaactcaccgtgtgcagcaccttcctcacacattttgctttgctttctgtcacaggaccatcagacgtagaacgtcctgactctcctgaattactagaatgtcagcaacaaactcacaaagtagattagagggtaggaatagatacataaatttttaaaaacctgccaatcatactgttttctagacagtaatataataagaacatgaggcaggacatccacaaatagtagagaataattaatagtccagaactgccaaataggaattccccttatgaaaacacccttgcagctaatcaggtagcccttgtttagaaaccaattagcactcataaaatatttgtacaaggagtgagtgggggagaaatgagcacaatatgggttctgccatcaatcagcttataatacaactaaagaaagaaaacatgctcaaagcaccattagagaaagggtgagccctaatgacatagtttcacattcaatatggtaggagttgaaacaagggagaaatgctgtggtttgaagtggttcaacaaggtaggatttctagagaaaggggggtttaggagttagataagtagaggatcagcattctaggtatgaaggcaggattatctggcatgtggcagggtgaatgatgttaatcagtaactgctaattgatatttactgagcagctgctgtgtcctcacgatggtaagactattagaggaagacagcccacctgcctaactgggaacacaaggcacacatatattggaaagatcatgttgcacaaaacaggtgttcaataaataatttttgaataaatgtgaacactgaatagcaaataaatgttatagatcgtaatagttgtagaagattggttgggattgtagggactggatgtggggcaatggctgtgggtctagagtatattcattgtgcagtggacacacacctaatctgtcctcaaggacagaaccatgtggaggaataggaaaacaagagaagcaggcaagaagcggaggcagtgagtacagcagctaagaaatgttacattgggttcatccagagcaagaaaagctgagagctgtccgtgagggaaggccacacaggcaagaggagtgggacaggggagtaaaggagtgggctacaacaggccctgcagatgtggaagccagacccacagaggcacttagaaagtgaggatcctggatgaattattttagggagaaagtgtaggtttagatcagctggcagatgtgtttgtgggctacagccaagtttttcaggactaagaaggagcaaaataagtagaacttcttgggacaggagatctagggtactccagaaccagggaaatgagaaacaagaggggaattttaagaaagagagggaagatcatctatgaggttggagatgaaaggtgttggagatggtgaggcacaagtcaaaagactcactcgaagggcaggaactctgcttatttgtccatattcccagagtttgtcatgaggtctggcccacgtgggcagtcactcggccactatgtatcactgtggctgccatggtggatggaggctggacagaacctgtggtgatcggcagtctttctggaggactcaccagggaggggtctcagggtgggcatctcctttcaccttcctgtgcatgtcactgcactgttcttcttccctccctgaacagcacacacactgcatccttagtttcaggggtctgaaaacaaatgctacgaccaccttgctttggtggcttttctgaacaggcattgtgagaagagatgttctggccaggtgaaagtggactttatttttaggtaggtttttcagtttagaaaggtttcctttgcttatcccttgaggacttctgtgctgctgcttctcctccatcttgctagttaacagaacaggggcagaagtgacaccaatgctctcggccatgcctgccttgggaagcactaccgggccccactgtttagaatcttagatggaaatgtacacaaggcattgacacacgcctgcgggagtgacccagtgcttccctcccatgggactcagggtcagcgtgggaaggcagctggcagggacaggagccccgcccgcaaggtggactgagcctcacttccacacaaaaccagagtcccatctgccccagagcgctcgctctcctccccttccttccgctcaatgcagcctgacacgcctttgaccagaactgcaacatttcaaacacaaacccagatctgttgggaaatcctaattaaaaacgttgcattcccaggtggcacaatcacatcctgcctaaaacttctggcccacatcccaccacccagatgttgaaaagaaacctttctctgcttaacaccaaaacctgcacttcaaggtttctttaggggacaaagaaaaaaaaagtacacacatgcagagttcagcctacatgttcattgaggaaaaagagcgtggcttattcatctttcaatcttttgattgttggcattatgattatgattatgattaattactctgacctgacaggaattgaagaagagactatatgctggtgctctgaaatgatctacccaactctgtcatctgtaacaaccagtgataactctcttgtcttgtaaaaagggtttgtacataacttgtacatggtttcattttgtatttttcgcagattaaaaatttatgtatttgtgttctaaaac

SEQ ID NO: 204 - protein, 1182 aa, homo sapiens
MANGGGGGGGSSGGGGGGGGSSLRMSSNIHANHLSLDASSSSSSSSSSSSSSSSSSSSSSVHEPKMDALIIPVTMEVPCDSRGQRMWWAFLASSMVTFFGGLFIILLWRTLKYLWTVCCHCGGKTKEAQKINNGSSQADGTLKPVDEKEEAVAAEVGWMTSVKDWAGVMISAQTLTGRVLVVLVFALSIGALVIYFIDSSNPIESCQNFYKDFTLQIDMAFNVFFLLYFGLRFIAANDKLWFWLEVNSVVDFFTVPPVFVSVYLNRSWLGLRFLRALRLIQFSEILQFLNILKTSNSIKLVNLLSIFISTWLTAAGFIHLVENSGDPWENFQNNQALTYWECVYLLMVTMSTVGYGDVYAKTTLGRLFMVFFILGGLAMFASYVPEIIELIGNRKKYGGSYSAVSGRKHIVVCGHITLESVSNFLKDFLHKDRDDVNVEIVFLHNISPNLELEALFKRHFTQVEFYQGSVLNPHDLARVKIESADACLILANKYCADPDAEDASNIMRVISIKNYHPKIRIITQMLQYHNKAHLLNIPSWNWKEGDDAICLAELKLGFIAQSCLAQGLSTMLANLFSMRSFIKIEEDTWQKYYLEGVSNEMYTEYLSSAFVGLSFPTVCELCFVKLKLLMIAIEYKSANRESRSRKRILINPGNHLKIQEGTLGFFIASDAKEVKRAFFYCKACHDDITDPKRIKKCGCKRLEDEQPSTLSPKKKQRNGGMRNSPNTSPKLMRHDPLLIPGNDQIDNMDSNVKKYDSTGMFHWCAPKEIEKVILTRSEAAMTVLSGHVVVCIFGDVSSALIGLRNLVMPLRASNFHYHELKHIVFVGSIEYLKREWETLHNFPKVSILPGTPLSRADLRAVNINLCDMCVILSANQNNIDDTSLQDKECILASLNIKSMQFDDSIGVLQANSQGFTPPGMDRSSPDNSPVHGMLRQPSITTGVNIPIITELVNDTNVQFLDQDDDDDPDTELYLTQPFACGTAFAVSVLDSLMSATYFNDNILTLIRTLVTGGATPELEALIAEENALRGGYSTPQTLANRDRCRVAQLALLDGPFADLGDGGCYGDLFCKALKTYNMLCFGIYRLRDAHLSTPSQCTKRYVITNPPYEFELVPTDLIFCLMQFDHNAGQSRASLSHSSHSSQSSSKKSSSVHSIPSTANRQNRPKSRESRDKQNRKEMVYR

SEQ ID NO: 205 - DNA, 11628 bp, homo sapiens
aacctctccgcgcgaagacggcttcagccctgcagggaaagaaaagtgcaatgattctggactgagacgcgcttgggcagaggctatgtaatcgtgtctgtgttgaggacttcgcttcgaggagggaagaggagggatcggctcgctcctccggcggcggcggcggcggcgactctgcaggcggagtttcgcggcggcggcaccagggttacgccagccccgcggggaggtctctccatccagcttctgcagcggcgaaagccccagcgcccgagcgcctgagccggcggggagcaagtaaagctagaccgatctccggggagccccggagtaggcgagcggcggccgccagctagttgagcgcaccccccgcccgccccagcggcgccgcggcgggcggcgtccaggcggcatggagaaggacggcctgtgccgcgctgaccagcagtacgaatgcgtggcggagatcggggagggcgcctatgggaaggtgttcaaggcccgcgacttgaagaacggaggccgtttcgtggcgttgaagcgcgtgcgggtgcagaccggcgaggagggcatgccgctctccaccatccgcgaggtggcggtgctgaggcacctggagaccttcgagcaccccaacgtggtcaggttgtttgatgtgtgcacagtgtcacgaacagacagagaaaccaaactaactttagtgtttgaacatgtcgatcaagacttgaccacttacttggataaagttccagagcctggagtgcccactgaaaccataaaggatatgatgtttcagcttctccgaggtctggactttcttcattcacaccgagtagtgcatcgcgatctaaaaccacagaacattctggtgaccagcagcggacaaataaaactcgctgacttcggccttgcccgcatctatagtttccagatggctctaacctcagtggtcgtcacgctgtggtacagagcacccgaagtcttgctccagtccagctacgccacccccgtggatctctggagtgttggctgcatatttgcagaaatgtttcgtagaaagcctctttttcgtggaagttcagatgttgatcaactaggaaaaatcttggacgtgattggactcccaggagaagaagactggcctagagatgttgcccttcccaggcaggcttttcattcaaaatctgcccaaccaattgagaagtttgtaacagatatcgatgaactaggcaaagacctacttctgaagtgtttgacatttaacccagccaaaagaatatctgcctacagtgccctgtctcacccatacttccaggacctggaaaggtgcaaagaaaacctggattcccacctgccgcccagccagaacacctcggagctgaatacagcctgaggcctcagcagccgccttaagctgatcctgcggagaacacccttggtggcttatgggtccccctcagcaagccctacagagctgtggaggattgctatctggaggccttccagctgctgtcttctggacaggctctgcttctccaaggaaaccgcctagtttactgttttgaaatcaatgcaagagtgattgcagctttatgttcatttgtttgtttgtttgtctgtttgtttcaagaacctggaaaaattccagaagaagagaagctgctgaccaattgtgctgccatttgatttttctaaccttgaatgctgccagtgtggagtgggtaatccaggcacagctgagttatgatgtaatctctctgcagctgccgggcctgatttggtacttttgagtgtgtgtgtgcatgtgtgtgtgtgtgtgtgtgtgtgtgtgtgtgtatgtgagagattctgtgatcttttaaagtgttactttttgtaaacgacaagaataattcaattttaaagactcaaggtggtcagtaaataacaggcatttgttcactgaaggtgattcaccaaaatagtcttctcaaattagaaagttaaccccatgtcctcagcatttcttttctggccaaaagcagtaaatttgctagcagtaaaagatgaagttttatacacacagcaaaaaggagaaaaaattctagtatattttaagagatgtgcatgcattctatttagtcttcagaatgctgaatttacttgttgtaagtctattttaaccttctgtatgacatcatgctttatcatttcttttggaaaatagcctgtaagctttttattacttgctataggtttagggagtgtacctcagatagattttaaaaaaaagaatagaaagcctttatttcctggtttgaaattcctttcttccctttttttgttgttgttattgttgtttgttgttgttattttgtttttgtttttaggaatttgtcagaaactctttcctgttttggtttggagagtagttctctctaactagagacaggagtggccttgaaattttcctcatctattacactgtactttctgccacacactgccttgttggcaaagtatccatcttgtctatctcccggcacttctgaaatatattgctaccattgtataactaataacagattgcttaagctgttcccatgcaccacctgtttgcttgctttcaatgaacctttcataaattcgcagtctcagcttatggtttatggcctcgattctgcaaacctaacagggtcacatatgttctctaatgcagtccttctacctggtgtttacttttgttacctaaataatgagtaggatcttgttttgttttatcaccagcacacagattgctataaactgttactttgtgaattacatttttatagaagatattttcagtgtctttacctgagggtatgtctttagctatgttttagggccatacatttactctatcaaatgatcttttctccatcccccaggctgtgcttatttctagtgccttgtgctcactcctgctctctacagagccagcctggcctgggcattgtaaacagcttttcctttttctcttactgttttctctacagtcctttatatttcataccatctctgccttataagtggtttagtgctcagttggctctagtaaccagaggacacagaaagtatcttttggaaagtttagccacctgtgctttctgactcagagtgcatgcaacagttagatcatgcaacagttagattatgtttagggttaggattttcaaagaatggaggttgctgcactcagaaaataattcagatcatgtttatgcattattaagttgtactgaattctttgcagcttaatgtgatatatgactatcttgaacaagagaaaaaactaggagatgtttctcctgaagagcttttggggttgggaactattcttttttaattgctgtactacttaacattgttctaattcagtagcttgaggaacaggaacattgttttctagagcaagataataaaggagatgggccatacaaatgttttctactttcgttgtgacaacattgattaggtgttgtcagtactataaatgcttgagatataatgaatccacagcattcaaggtcaggtctactcaaagtctcacatggaaaagtgagttctgcctttcctttgatcgagggtcaaaatacaaagacatttttgctagggcctacaaattgaatttaaaaactcactgcactgattcatctgagctttttggttagtattcatggctagagtgaacatagctttagtttttgctgttgtaaaagtgttttcataagttcactcaagaaaaatgcagctgttctgaactggaatttttcagcattctttagaattttaaatgagtagagagctcaacttttattcctagcatctgcttttgactcatttctaggcagtgcttatgaagaaaaattaaagcacaaacattctggcattcaatcgttggcagattatcttctgatgacacagaatgaaagggcatctcagcctctctgaactttgtaaaaatctgtccccagttcttccatcggtgtagttgttgcatttgagtgaatactctcttgatttatgtattttatgtccagattcgccatttctgaaatccagatccaacacaagcagtcttgccgttagggcattttgaagcagatagtagagtaagaacttagtgactacagcttattcttctgtaacatatggtttcaaacatctttgccaaaagctaagcagtggtgaactgaaaagggcatattgccccaaggttacactgaagcagctcatagcaagttaaaatattgtgacagatttgaaatcatgtttgaatttcatagtaggaccagtacaagaatgtccctgctagtttctgtttgatgtttggttctggcggctcaggcattttgggaactgttgcacagggtggagtcaaaacaacctacatataaaaagagaaaaagagaaacttgtccatttagctttcataagaaatcccatggcaaagggtaataaaaaggacctaatcttaaaaatacaatttctaagcacttgtaagaacccagtgggttggagcctcccactttgtccctcctttgaagtggatgggaactcaaggtgcaaagaacctgttttggaagaaagcttggggccatttcagccccctgtattctcatgattttctctcaggaagcacacactgtgaatggcagacttttcatttagccccaggtgacttactaaaaatagttgaaaattattcacctaagaatagaatctcagcattgtgttaaataaaaatgaaagctttagaaggcatgagatgttcctatcttaaataaagcatgtttcttttctatagagaaatgtatagtttgactctccagaatgtactatccatcttgatgagaaaactcttaaatagtaccaaacattttgaactttaaattatgtatttaaagtgagtgtttaagaaactgtagctgcttcttttacaagtggtgcctattaaagtcagtaatggccattattgttccattgtggaaattaaattatgtaagcttcctaatatcataaacatattaaaattcttctaaaatattgcttttcttttaagtgacaatttgactattcttatgataagcacatgagagtgtcttacattttccaaaagcaggctttaattgcatagttgagtctaggaaaaaataatgttaaaagtgaatatgccaccataattacttaattatgttagtatagaaactacagaatatttaccctggaaagaaaatattggaatgttattataaactcttagatatttatataattcaaaagaatgcatgtttcacattgtgacagataaagatgtatgatttctaaggctttaaaaattattcataaaacagtgggcaatagataaaggaaattctggagaaaatgaaggtatttaaagggtagtttcaaagctatatatattttgaaggatatattctttatgaacaaatatattgtaaaaatttatactaaggtcatctggtaactgtgggattaatatggtcgaaaacaaatgttatggagaagctgtcccaagcaaactaaattacctgtacttttttcccatttcaagggaagaggcaaccacatgaagcaatacttcttacacatgcctaagaacgttcattgaaaaaataaatttttaaaaggcatgtgtttcctatgccaccaatacttttgaaaaattgtgaaccttacccaaaaccatttatcatgtccattaagtatatttgggtatataattaggaagatatttacatgttccatctccacagtggaaaaacttattgaggctaccaaagtgtgccaagaaatgtaagtccttagagtaattagaaatgctgttttcctcaaaagcatgagaaactagcattttcatttcttatttactccctttctatatcaatgcaattcacaacccaattttaatacatccctatatctcaagcatttctatcttgtactttttcagaaaataaaccaaaaataatcctttggtctctctatcttctgacctttgtaagcaacagaaatgtaaaaacagaaggggtccaatttttacacgtttttttctcaagtagcctttctggggatttttattttcttaatgaagtgccaatcagcttttcaaaatgttttctatttctcagcatttccaggaagtgataacgtttagctaaatgagtagaagtggacttccttcaacatattgttaccttgtctagccttaggaagaaaacaagagccacctgaaaataaatacaggctcttttcgagcatctgctgaaatactgttacagcaatttgaagttgatgtggtaggaaaggaaggtgacttttcttgcaaaagtctttctaaacattcacactgtcctaagagatgagctttcttgttttattccggtatattccacaaggtggcacttttagagaaaaacaaatctgatgaagactaaagaggtacttctaaaagagatttcattctaactttatttttctgcgcatatttaactctttcctagcacttgttttttgggatgattaatagtctctataatgttctgtaacttcaatattttacttgttacctaggttctgaacaattgtctgcaaataaattgttcttaaggatggataatacacccattttgatcatttaagtaaagaaagcctagtcattcattcagtcaagaaaaaatttttgaagtacccagttaccttacttttctagattaaaacaggcttagttactaaaaaggcagtcctcatctgtgaacaggatagtttcgttagaagtataaaactcctttagtggccccagttaaaacacacataccctctctgctgctttcaaattccctagcatggtggcctttcaacattgattaaattttaaaatcctaatttaaagatcaggtgagcaaaatgagtagcacatcagtaattcagtagacaaaacttttgtctgaaaaattgctgtattgaaacagagccctaaaataccaaaagaccaggtaattttaacatttgtggaatcacaaatgtaaattcataagaagctctaattaaaaaaaaaaagtctgaagtatatgagcataacaacttaggagtgtgtctacatacttaacttttgaagttttttggcaactttatatactttttttaaatttacaagtctacttaaagacttcttataccccaaatgattaagttaattttagaggtcacctttctcacagcagtgtcacttgaaatttagtagggaaggatattgcagtatttttcagtttccttagcacagcaccacagaaagcagcttattccttttgagtggcagacactcgacggtgcctgcccaactttcctcctgagtggcaagcagatgagtctcagtaattcatactgaaccaaaatgccacatacactaggggcagtcagaaactggctgagaaatcccccgcctcattcgcccctctgctcccaggaactagagtccagttaaagcccctatgcgaaaggccgaattccaccccagggtttgttataacagtggccagtctgaaccccatttgctcgtgctcaaaacttgattcccacttgaaagccttccgggcgcgctgcctcgttgccccgcccctttggcaggagagaggcagtgggcgaggccgggctggggccccgcctcccactcacctgccggtgcctgaaattatgtgcggccccgcgggctgctttccgaggtcagagtgccctgctgctgtctcagaggcatctgttctgcaaatcttaggaagaaaaatgtccctagtagcaaacgggtgtcttctgtgcataaataagtacaacacaattctccgaaagttcgggtaaaaagagatgcggtagcagctgccctgtgtgaagctgtctaccccgcatctctcaggcgctaagctcagtttttgtttttgtttttgtttttttaaagaaaagatgtataattgcaggaatttttttttatttttttattttccatcattctatatatgtgatggtgaaagatatgcctggaaaagttttgttttgaaaagtttattttctgcttcgtcttcagttggcaaaagctctcaattctttagcttccagtttcttttctctctttttctttgttaggtaattaaaggtatgtaaacaaattatctcatgtagcaggggattttcatgttgagaggaatcttccgtgtgagttgtttggtcacacaaataaccctttctcaattttaggagtttggattgtcaaatgtaggtttttctcaaagggggcatataactacatattgactgccaagaactatgactgtagcactaatcagcacacatagagccacacaattatttaatttctaactctctgtggtccctagaaaaattccgttgatgtgcttaggttaaagttctgaagatacccgttgtacccttacttgaaagtttctaatcttaagttttatgaaatgcaataatatgtatcagctagcaatatttctgtgatcaccaacaactctcagtttgatcttaaagtctgaataataaaacaaatcccagcagtaatacatttcttaaacctcacagtgcatgatatatcttttcattctgatcctgtgtttgcaaaaatatacacatgtatatcatagttcctcactttttattcatttgttttcctattacctgtagtaaatatattagttagtacatggaatttatagcatcagctacccccaggaacagcacctgacaggcgggggattttttttcaagttgttctacatttgcataaattatttctattattattcatgtatgttatttatttctgaatcacactagtcctgtgaaagtacaactgaaggcagaaagtgttaggattttgcatctaatgttcattatcatggtattgatggacctaagaaaataaaaattagactaagcccccaaataagctgcatgcatttgtaacatgattagtagatttgaatatatagatgtagtattttgggtatctaggtgttttatcattatgtaaaggaattaaagtaaaggactttgtagttgtttttattaaatatgcatatagtagagtgcaaaaatatagcaaaaataaaaactaaaggtagaaaagcattttagatatgccttaatttagaaactgtgccaggtggccctcggaatagatgccaggcagagaccagtgcctgggtggtgcctcctcttgtctgccctcatgaagaagcttccctcacgtgatgtagtgccctcgtaggtgtcatgtggagtagtgggaacaggcagtactgttgagaggagagcagtgtgagagtttttctgtagaagcagaactgtcagcttgtgccttgaggcttccagaacgtgtcagatggagaagtccaagtttccatgcttcaggcaacttagctgtgtacagaagcaatccagtgtggtaataaaaagcaaggattgcctgtataatttattataaaataaaagggattttaacaaccaacaattcccaacacctcaaaagcttgttgcattttttggtatttgaggtttttatctgaaggttaaagggcaagtgtttggtatagaagagcagtatgtgttaagaaaagaaaaatattggttcacgtagagtgcaaattagaactagaaagttttatacgattatcattttgagatgtgttaaagtaggttttcactgtaaaatgtattagtgtttctgcattgccatagggcctggttaaaactttctcttaggtttcaggaagactgtcacatacagtaagcttttttccttctgacttataatagaaaatgttttgaaagtaaaaaaaaaaaatctaatttggaaatttgacttgttagtttctgtgtttgaaatcatggttctagaaatgtagaaattgtgtatatcagatactcatctaggctgtgtgaaccagcccaagatgaccaacatccccacacctctacatctctgtcccctgtatctcttcctttctaccactaaagtgttccctgctaccatcctggcttgtccacatggtgctctccatcttcctccacatcatggaccacaggtgtgcctgtctaggcctggccaccactcccaacttgacctagccacattcatctagagatggttcctgatgctgggcacagactgtgctcatggcacccattagaaatgcctctagcatctttgtatgcatcttgatttttaaaccaagtcattgtacagagcattcagttttggctgtggtaccaagagaaaaactaatcaagaatataaaccacattccaggctgctgttttctctccatctacaggccacacttttactgtatttcttcatacttgaaattcattctgctattttcatatcagggtacagacttataagggtgcatgttccttaaaggtgcataattattcttattccgtttgcttatattgctacagaatgctctgttttggtgctttgagttctgcagacccaagaagcagtgtggaaattcactgcctgggacacagtcttataagaatgttggcaggtgactttgtatcagatgttgcttctcttttctctgtacacagattgagagttaccacagtggcctgtcgggtccaccctgtgggtgcagcacagctctctgaaagcaagaaccttcctacctattctaacgtttttgccctctaagaaaaatggcctcaggtatggtatagacatagcaagaggggaagggctgtctcactctagcaaccatccctccattacacacagaaagccctcttgaagcaaaagaagaagaaagaaagaaagcttatctctaaggctactgtcttcagaatgctctgagctgaatgctcttgctcctttcccaagaggcagatgaaaatatagccagtttatctatacccttcctatctgaggaggagaatagaaaagtagggtaaatatgtaacgtaaaatatgtcattcaaggaccaccaaaactttaagtaccctatcattaaaaatctggttttaaaagtagctcaagtaagggatgctttgtgacccagggtttctgaagtcagatagccattcttacctgccccttactctgacttattgggaaagggagaactgcagtggtgtttctgttgcagtggcaaaggtaacatgtcagaaaattcagagggttgcataccaataatcctttggaaactggatgtcttactgggtgctagaatgaaaatgtaggtatttattgtcagatgatgaagttcattgtttttttcaaaattggtgttgaaatatcactgtccaatgtgttcacttatgtgaaagctaaattgaatgaggcaaaaagagcaaatagtttgtatatttgtaataccttttgtatttcttacaataaaaatattggtagcaaataaaaataataaaaacaataactttaaactgctttctggagatgaattactctcctggctattttcttttttactttaatgtaaaatgagtataactgtagtgagtaaaattcattaaattccaagttttagcagaaaaaaaaaaaaaaaaaa

SEQ ID NO: 206 - protein, 326 aa, homo sapiens
MEKDGLCRADQQYECVAEIGEGAYGKVFKARDLKNGGRFVALKRVRVQTGEEGMPLSTIREVAVLRHLETFEHPNVVRLFDVCTVSRTDRETKLTLVFEHVDQDLTTYLDKVPEPGVPTETIKDMMFQLLRGLDFLHSHRVVHRDLKPQNILVTSSGQIKLADFGLARIYSFQMALTSVVVTLWYRAPEVLLQSSYATPVDLWSVGCIFAEMFRRKPLFRGSSDVDQLGKILDVIGLPGEEDWPRDVALPRQAFHSKSAQPIEKFVTDIDELGKDLLLKCLTFNPAKRISAYSALSHPYFQDLERCKENLDSHLPPSQNTSELNTA

SEQ ID NO: 207 - DNA, 6506 bp, homo sapiens
agacgcgcctccaccgccgggcagtgggcaggtatggctgagggcgtgtgagcgccgagcgctaagggccgccgccaccatgccagggggcgcaggcgccgcccggctctgcttgctggcgtttgccctgcagcccctccggccgcgggcggcgcgggagcctggatggacaagaggaagtgaggaaggcagccccaagctgcagcatgaacttatcatacctcagtggaagacttcagaaagccccgtgagagaaaagcatccactcaaagctgagctcagggtaatggctgaggggcgagaactgatcctggacctggagaagaatgagcaactttttgctccttcctacacagaaacccattatacttcaagtggtaaccctcaaaccaccacacggaaattggaggatcactgcttttaccacggcacggtgagggagacagaactgtccagcgtcacgctcagcacttgccgaggaattagaggactgattacggtgagcagcaacctcagctacgtcatcgagcccctccctgacagcaagggccaacaccttatttacagatctgaacatctcaagccgcccccgggaaactgtgggttcgagcactccaagcccaccaccagggactgggctcttcagtttacacaacagaccaagaagcgacctcgcaggatgaaaagggaagatttaaactccatgaagtatgtggagctttacctcgtggctgattatttagagtttcagaagaatcgacgagaccaggacgccaccaaacacaagctcatagagatcgccaactatgttgataagttttaccgatccttgaacatccggattgctctcgtgggcttggaagtgtggacccacgggaacatgtgtgaagtttcagagaatccatattctaccctctggtcctttctcagttggaggcgcaagctgcttgcccagaagtaccatgacaacgcccaattaatcacgggcatgtccttccacggcaccaccatcggcctggcccccctcatggccatgtgctctgtgtaccagtctggaggagtcaacatggaccactccgagaatgccattggcgtggctgccaccatggcccacgagatgggccacaactttggcatgacccatgattctgcagattgctgctcggccagtgcggctgatggtgggtgcatcatggcagctgccactgggcacccctttcccaaagtgttcaatggatgcaacaggagggagctggacaggtatctgcagtcaggtggtggaatgtgtctctccaacatgccagacaccaggatgttgtatggaggccggaggtgtgggaacgggtatctggaagatggggaagagtgtgactgtggagaagaagaggaatgtaacaacccctgctgcaatgcctctaattgtaccctgaggccgggggcggagtgtgctcacggctcctgctgccaccagtgtaagctgttggctcctgggaccctgtgccgcgagcaggccaggcagtgtgacctcccggagttctgtacgggcaagtctccccactgccctaccaacttctaccagatggatggtaccccctgtgagggcggccaggcctactgctacaacggcatgtgcctcacctaccaggagcagtgccagcagctgtggggacccggagcccgacctgcccctgacctctgcttcgagaaggtgaatgtggcaggagacacctttggaaactgtggaaaggacatgaatggtgaacacaggaagtgcaacatgagagatgcgaagtgtgggaagatccagtgtcagagctctgaggcccggcccctggagtccaacgcggtgcccattgacaccactatcatcatgaatgggaggcagatccagtgccggggcacccacgtctaccgaggtcctgaggaggagggtgacatgctggacccagggctggtgatgactggaaccaagtgtggctacaaccatatttgctttgaggggcagtgcaggaacacctccttctttgaaactgaaggctgtgggaagaagtgcaatggccatggggtctgtaacaacaaccagaactgccactgcctgccgggctgggccccgcccttctgcaacacaccgggccacgggggcagtatcgacagtgggcctatgccccctgagagtgtgggtcctgtggtagctggagtgttggtggccatcttggtgctggcggtcctcatgctgatgtactactgctgcagacagaacaacaaactaggccaactcaagccctcagctctcccttccaagctgaggcaacagttcagttgtcccttcagggtttctcagaacagcgggactggtcatgccaacccaactttcaagctgcagacgccccagggcaagcgaaaggtgatcaacactccggaaatcctgcggaagccctcccagcctcctccccggccccctccagattatctgcgtggtgggtccccacctgcaccactgccagctcacctgagcagggctgctaggaactccccagggcccgggtctcaaatagagaggacggagtcgtccaggaggcctcctccaagccggccaattccccccgcaccaaattgcatcgtttcccaggacttctccaggcctcggccgccccagaaggcactcccggcaaacccagtgccaggccgcaggagcctccccaggccaggaggtgcatccccactgcggccccctggtgctggccctcagcagtcccggcctctggcagcacttgccccaaagtttccagaatacagatcacagagggctggagggatgattagctcgaaaatctagacctgtccaaggggcttctccctttccttgagctctctggacactgcagaggacccatggccatggaaccctgaagaagcatgtctggccgcctctgagctcctcccaccctcctccaggaacctccacatctccaaaaatctccctgttgactcagtgcctcctcggcttccttggaagcccagagggactatgatctgatggcctctaggtgttgttttgtgcaatatacagccccaggtagggaggggagagtatgaggagggtgactggcagcttctcctccagactcctagccccgaggtgctgatggagatgctcaaggccagcaagcccctcaggccagcacttcgcttgcagaagccatccattcactcctggggtgcagggcacgcaagagagcttcccattgcttctgctctcctcagaggtcccgggctggatggaggctggtacttacccaccccttttagcttttagggattaaggaagggtcaagccagccactgctgtggccctgcccagggcttggttgagggaacggcttctggctgtatggctgcatgtgacaagccacgtcccctcccacctctccccaaacccctgcatccctgtattcacacgggtcactctgactcagacaggtactattcgtaggcagtgtagacagcaggaggagcaccgggcttgggcttcctctgagccgtgatgccaaaggttgcgactcctgactctggataatttttagttgctctttgttttctctgccgcactttcctggtgccccacgcttttctctcttccttcccctctcattctccctctaatgtgtggtgctttggtgagcaaaccctcagcagtcctgaccttcgggtgaccaggtgcttgtgacctacaagtcagagtcctctctcacagtcggccactggatttccctcactggctctcaggagtgtgaccagagtagacttggggcatggccattggggtcatatgtttatttttcattgtgttttgtgacctcagcagggtgggggtcttcctccttactctaagctaaatctaggtgaggtttccccttagggagcccagctatttacaaagtacacacgagggagcaggctggtcattgacttcgggctggaccgttgccctctgagcagagaacagacccatttctgggagctgcccgagatcactggagaaggcagccagcagcagctgcactggaacagtcagagcagggagcctcttcctcaacccagctttttgtcattcacttccttttgttctctctctggtcactgcccttacctgaccctcacagaaagagagctctgagcaggtgagggggtctgcggtggctcctgtcttccctgcagcagggaaggagggccgtgtggtgctttgctagataggacggtttttgcaaagcacctggagatgtttgctgggagatagactcccactccacaaaggtgctgggtggctctccggacaggagctggcctgactctcactcctctgaggctttcctggggcctcctcccatcctgccatgagcaattgtttgctcttgaaaacctcactgcaaggctgaggctgagcttctgattcaccaccccagggcctccttatagttctctgcacacaataggtgcttcttggatgttcttgggtttggaaataagtggaaaatacgggatgtacccctgggggaaaagcctgggttgggtttagaaagatctcaggaaaatgagtttctcttccctcagggtggctgtgatacaggttccccatgtccttgccgtgggtcatccttgctgtgggtcatccttgctgtggagatccattccccacctttcctgtggcccaaccttttatttaaatgtgctaccctctgcctcaaggcttggttcctggaaagtaaaggtgaaaacatcccctttcacccctctgcaaaacaaacaagcaacatcctcaaaacccaaccccatgcctcacagagcttcctgtggcttctccagcctttctccctcacatcaggaggtagatagctctgaaatgacagcgccacagccatagtgactgcatgagccatctgaacctgcagtccaccctccctggaaccacaccagaaagagacctgggttgtcgttttcttgctttttgttttgttttgttttattattttcatatcacctccatcccataaagttgtactgtgaactggaagatggtggaatgttttggaatttgatagactttcggcaaccagttctactaatgcttcactcctggctctgttcagggaggctgcccaggaggaagactggccattatgcatccccttttctttccagtgcccagtatgctgttttgaggtgtcaaatacaaataaatctgggcttagggaaggagagaccttattccaaagcacgattgcagaaggggaaagggaatattgcaaaagggagaggaaggggccttatgggaatagtgaaaaggctcagaccgaccgatggcaagatctgcaagcgtctcaaagcccaggcagaaaaggacttttcttttattggaagaagtaaacatggctagaaagaaccacgttcagggaatgacgttgtgcccagcctttttttttttttttttttttttgtctccaggggaggggctgtttgctggctcaggctgaggatggcccaaagtccagggtctggtggggaggagggaagcttaactcaagtttgggttagtgagttagcaagctctttgtgcagatggggatgtaggtaaatctttttaaaagtgaaattaacctcctgccaattttacaacccaagaatttttttttaagggccttggagccatctctaaaacaaacctcaagggatttagtgccctgtctccctgtctctagaagccttagcctgggcacctggctcaatcttgtaactgcctgctagccatagattcctttcagccttgctgacttctccctataaaagtaaagcctttttctgccccagctctgagacacttgcagatcttaaggtctgagacttgctgattttctggttggagtgtttttttgtattgccatagtcccttccccctgaagcaatagcccctccccacctcctgcaatacgcctttccaatctttattggaagtctctccctgcctacttcctaatttattcttatttgacagagggtatggaagacttgcaatttgaaaactggggaccagttccaaagtcagtaattgtgttaaccacgtgtataacagctctgctggacacccaagaaagccatgggaacgccaactggaaaggtccccttccccaggggagcctgcgaaggagaggttctgtagaatccaagcccacatttccaaagtcacccccaacgcgtcctctcacaccgtccactgtgcgtttgtatgtgtctgggatccagggcaatgtgaattttctttttatttgggagattgttcacggaaaacagatcttcttctctcttgtccacctattaattgtttacaatatttgtacatctatgcaaaatacttgaatgggccatggtgccttttttccttgttagtatttaattaaaaatgaattgtttgtcatttgcaatgttaaaaaaaaaaaaaaaaaaaaaaaaaa

SEQ ID NO: 208 - protein, 918 aa, homo sapiens
MPGGAGAARLCLLAFALQPLRPRAAREPGWTRGSEEGSPKLQHELIIPQWKTSESPVREKHPLKAELRVMAEGRELILDLEKNEQLFAPSYTETHYTSSGNPQTTTRKLEDHCFYHGTVRETELSSVTLSTCRGIRGLITVSSNLSYVIEPLPDSKGQHLIYRSEHLKPPPGNCGFEHSKPTTRDWALQFTQQTKKRPRRMKREDLNSMKYVELYLVADYLEFQKNRRDQDATKHKLIEIANYVDKFYRSLNIRIALVGLEVWTHGNMCEVSENPYSTLWSFLSWRRKLLAQKYHDNAQLITGMSFHGTTIGLAPLMAMCSVYQSGGVNMDHSENAIGVAATMAHEMGHNFGMTHDSADCCSASAADGGCIMAAATGHPFPKVFNGCNRRELDRYLQSGGGMCLSNMPDTRMLYGGRRCGNGYLEDGEECDCGEEEECNNPCCNASNCTLRPGAECAHGSCCHQCKLLAPGTLCREQARQCDLPEFCTGKSPHCPTNFYQMDGTPCEGGQAYCYNGMCLTYQEQCQQLWGPGARPAPDLCFEKVNVAGDTFGNCGKDMNGEHRKCNMRDAKCGKIQCQSSEARPLESNAVPIDTTIIMNGRQIQCRGTHVYRGPEEEGDMLDPGLVMTGTKCGYNHICFEGQCRNTSFFETEGCGKKCNGHGVCNNNQNCHCLPGWAPPFCNTPGHGGSIDSGPMPPESVGPVVAGVLVAILVLAVLMLMYYCCRQNNKLGQLKPSALPSKLRQQFSCPFRVSQNSGTGHANPTFKLQTPQGKRKVINTPEILRKPSQPPPRPPPDYLRGGSPPAPLPAHLSRAARNSPGPGSQIERTESSRRPPPSRPIPPAPNCIVSQDFSRPRPPQKALPANPVPGRRSLPRPGGASPLRPPGAGPQQSRPLAALAPKFPEYRSQRAGGMISSKI

SEQ ID NO: 209 - DNA, 1311 bp, homo sapiens
agtctagctgctgcacaggctggctggctggctggctgctaagggctgctccacgcttttgccggaggacagagactgacatggaacaggggaagggcctggctgtcctcatcctggctatcattcttcttcaaggtactttggcccagtcaatcaaaggaaaccacttggttaaggtgtatgactatcaagaagatggttcggtacttctgacttgtgatgcagaagccaaaaatatcacatggtttaaagatgggaagatgatcggcttcctaactgaagataaaaaaaaatggaatctgggaagtaatgccaaggaccctcgagggatgtatcagtgtaaaggatcacagaacaagtcaaaaccactccaagtgtattacagaatgtgtcagaactgcattgaactaaatgcagccaccatatctggctttctctttgctgaaatcgtcagcattttcgtccttgctgttggggtctacttcattgctggacaggatggagttcgccagtcgagagcttcagacaagcagactctgttgcccaatgaccagctctaccagcccctcaaggatcgagaagatgaccagtacagccaccttcaaggaaaccagttgaggaggaattgaactcaggactcagagtagtccaggtgttctcctcctattcagttcccagaatcaaagcaatgcattttggaaagctcctagcagagagactttcagccctaaatctagactcaaggttcccagagatgacaaatggagaagaaaggccatcagagcaaatttgggggtttctcaaataaaataaaaataaaaacaaatactgtgtttcagaagcgccacctattggggaaaattgtaaaagaaaaatgaaaagatcaaataaccccctggatttgaatataattttttgtgttgtaatttttatttcgtttttgtataggttataattcacatggctcaaatattcagtgaaagctctccctccaccgccatcccctgctacccagtgaccctgttgccctcttcagagacaaattagtttctcttttttttttttttttttttttttttgagacagtctggctctgtcacccaggctgaaatgcagtggcaccatctcggctcactgcaacctctgcctcctgggttcaagcgattctcctgcctcagcctcccgggcagctgggattacaggcacacactaccacacctggctaatttttgtatttttagtagagacagggttttgctctgttggccaagctggtctcgaactcctgacctcaagtgatccgcccgcctc

SEQ ID NO: 210 - protein, 182 aa, homo sapiens
MEQGKGLAVLILAIILLQGTLAQSIKGNHLVKVYDYQEDGSVLLTCDAEAKNITWFKDGKMIGFLTEDKKKWNLGSNAKDPRGMYQCKGSQNKSKPLQVYYRMCQNCIELNAATISGFLFAEIVSIFVLAVGVYFIAGQDGVRQSRASDKQTLLPNDQLYQPLKDREDDQYSHLQGNQLRRN

SEQ ID NO: 211 - DNA, 2161 bp, homo sapiens
atctttgctgcaaaggctgggtatcggctgtgctcagcaaagcgtcaactcgtgcaagaacttagcaggaatagttctggctaaggttaggaggctgccaccaaagtctcttttttgttcctctgcttctcccgtttgcctccttatcatgagatctttttgctaagctggcagaaagattgcatagtcagtgcttccagctctgctcccacctgatcctgcactgtcctctggtccctgaatgaatgaactctgatacccaatcttgtctcgagccttctctatgccactcatggctcctcttctgctctttccatctttttgctgagagttctgagctctgtacttcctcttggcccatctcacttcctgaaacacccctgaagagggttgcttatcttgatggaactcaaaaagccaaaaagctgcaggcagaggcgttgaggacatctgtttggggaactaagagcagcagcactttcagattcagtccatatagagctgtcctacagcattctggaaacttgaggatgtgcggtgcataaaggggctggaagtgacccacctgtgatgagccctttctaaggagaagggtttccaagagatcaccccaccagaaaagggtaggaatgagcaagttgggaattttagactgtcactgcacatggacctctgggaagacgtctggcgagagctaggcccactggccctacagacggatcttgctggctcacctgtccctgtggaggttcccctgggaaggcaagatgcccaacaacagcactgctctgtcattggccaatgttacctacatcaccatggaaattttcattggactctgcgccatagtgggcaacgtgctggtcatctgcgtggtcaagctgaaccccagcctgcagaccaccaccttctatttcattgtctctctagccctggctgacattgctgttggggtgctggtcatgcctttggccattgttgtcagcctgggcatcacaatccacttctacagctgcctttttatgacttgcctactgcttatctttacccacgcctccatcatgtccttgctggccatcgctgtggaccgatacttgcgggtcaagcttaccgtcagattcagaattcctgggctccctgggtgcattctatcattccagttgaaagtttgcttccttccagtcatgtggctcttcattctactctccttggctctcatttcagatgccatggtcatggatgaaaaggtcaagagaagctttgtgctggacacggcttctgccatctgcaactacaatgcccactacaagaatcaccccaaatactggtgccgaggctatttccgtgactactgcaacatcatcgccttctcccctaacagcaccaatcatgtggccctgagggacacagggaaccagctcattgtcactatgtcctgcctgaccaaagaggacacgggctggtactggtgtggcatccagcgggactttgccagggatgacatggattttacagagctgattgtaactgacgacaaaggaaccctggccaatgacttttggtctgggaaagacctatcaggcaacaaaaccagaagctgcaaggctcccaaagttgtccgcaaggctgaccgctccaggacgtccattctcatcatttgcatactgatcacgggtttgggaatcatctctgtaatcagtcatttgaccaaaaggaggagaagtcaaaggaatagaagggtaggcaacactttgaagcccttctcgcgtgtcctgactccaaaggaaatggctcctactgaacagatgtgactgaagatttttttaatttagttcataaagtgatgctacaacagaataatcaccatgacaactggcccacacctcagagactgattctgatctcccaggaattctgaaggaccctctatccttgacaacaatcatttgcagccaggtagcaacggcggtagtcagaggagctatgatagaccacacccaagcaaggctgccctcaaataacatctcaagatcttagttcttatgcattccatcagtcagaagtgaagaagaggtggagaatctggattggggaccaggaaatcacttgtattttgttagccaataaattcctagccagtgttgaatgaaaaaaaaaaaaa

SEQ ID NO: 212 - protein, 347 aa, homo sapiens
MPNNSTALSLANVTYITMEIFIGLCAIVGNVLVICVVKLNPSLQTTTFYFIVSLALADIAVGVLVMPLAIVVSLGITIHFYSCLFMTCLLLIFTHASIMSLLAIAVDRYLRVKLTVRFRIPGLPGCILSFQLKVCFLPVMWLFILLSLALISDAMVMDEKVKRSFVLDTASAICNYNAHYKNHPKYWCRGYFRDYCNIIAFSPNSTNHVALRDTGNQLIVTMSCLTKEDTGWYWCGIQRDFARDDMDFTELIVTDDKGTLANDFWSGKDLSGNKTRSCKAPKVVRKADRSRTSILIICILITGLGIISVISHLTKRRRSQRNRRVGNTLKPFSRVLTPKEMAPTEQM

SEQ ID NO: 213 - DNA, 2840 bp, homo sapiens
tttttcctggcactgctgagccacctgcagttgcgagagccgctgggagggataagagggaagaggacgcccggtgaaggggctccagcctggcagtttctgcgtgttagcatttctagaatagagtgggtgggaactgacccaagtaaagtcccagagactcgaacactgacgcacaggaaagcctcaagtgggaggagaaatgcaaatcccctactgatgatggcgtcagcggctttctcctagggactgtgaggggcgcttctgactttggacttgagcactgcctgggacctgtgctgagagagcgctagcatgtctcagtggaatcaagtccaacagttagaaatcaagtttttggagcaggtggatcaattctatgatgacaactttcccatggaaattcggcatctgttggcccaatggattgaaaatcaagactgggaggcagcttctaacaatgaaaccatggcaacgattcttcttcaaaacttgttaatacaactggatgaacagttaggtcgtgtttccaaagagaaaaacctactcttgatacacaatctaaaaagaattaggaaggtccttcagggaaaatttcatggaaatccaatgcatgtagctgtggttatttcaaactgtttaagggaagagaggagaatattggctgcagccaacatgcctgtccaggggcctctagagaaatccttacaaagttcttcagtttcagaaagacagaggaatgtggagcacaaagtggctgccattaaaaacagtgtgcagatgacagaacaagataccaaatacttagaagatctgcaagacgaatttgactacaggtataaaacaattcagacaatggatcagagtgacaagaatagtgccatggtgaatcaggaagttttgacactgcaggaaatgcttaacagcctcgatttcaagagaaaggaggctctcagtaaaatgacccaaatcatccatgagacagacctgttaatgaacaccatgctcatagaagagctgcaagactggaagcggcggcagcaaatcgcctgcatcgggggtccactccacaatgggctcgaccagcttcagaactgctttacactattggcagaaagtcttttccaactgagaaggcaattggagaaactagaggagcaatctaccaaaatgacatatgaaggtgatcccattccaatgcaaagaactcacatgctagaaagagtcaccttcttgatctacaaccttttcaagaactcatttgtggttgagcgacagccatgtatgccaacccaccctcagaggccgttggtacttaaaaccctaattcagttcactgtaaaactaaggctactaataaaattgccagaactaaactatcaggtaaaggttaaggcatcaattgacaagaatgtttcaactctaagcaaccgaagatttgtactttgtggaactaatgtcaaagccatgtctattgaagaatcttccaatgggagtctctcagtagaatttcgacatttgcaaccaaaggaaatgaagtccagtgctggaggtaaaggaaatgagggctgtcacatggtgactgaagaacttcattccataacgtttgaaacacagatctgcctctatggcctgaccatagatttggagaccagctcattgcctgtggtgatgatttccaatgtcagtcagttacctaatgcttgggcatccatcatttggtacaacgtgtcaaccaacgattcccagaacttggttttctttaataatcctccacctgccacattgagtcaactactggaggtgatgagctggcagttttcatcgtacgttggtcgtggtcttaactcagatcaactccatatgctggcagagaagcttacagtccaatctagctacagtgatggtcacctcacctgggccaagttctgcaaggaacatttacctggtaaatcatttaccttttggacatggcttgaagcaatattggatctaattaagaaacacattcttcccctttggattgatgggtatgtcatgggctttgttagcaaagagaaggaacggctgttgctaaaggataaaatgcctggcacctttttattaagattcagtgaaagccatctcggaggaataactttcacctgggtggaccattctgaaagtggggaagtgagattccactctgtagaaccctacaataaaggccggttgtctgctctgccattcgctgacatcctgcgagactacaaagttattatggctgaaaacattcctgaaaaccctctgaagtacctatatcctgacattcccaaagacaaagccttcggtaaacactacagctctcagccttgcgaagtttcaagaccaacagaaaggggtgacaaaggttatgttccttctgtttttatccccatctcaacaatccgaagtgattcaacagagccacattctccatcagaccttcttcccatgtctccaagtgtgtatgcggtgttgagagaaaacctgagtcccacaacaattgaaactgcaatgaagtctccttattctgctgaatgacaggataaactctgacgcaccaagaaaggaagcaaatgaaaaagtttaaagactgttctttgcccaataaccacattttatttcttcagctttgtaaataccaggttctaggaaatgtttgacatctgaagctctcttcacactcccgtggcactcctcaattgggagtgttgtgactgaaatgcttgaaaccaaagcttcagataaacttgcaagataagacaactttaagaaaccagtgttaataacaatattaacagaagaaaaaaaaaaaaaaa

SEQ ID NO: 214 - protein, 748 aa, homo sapiens
MSQWNQVQQLEIKFLEQVDQFYDDNFPMEIRHLLAQWIENQDWEAASNNETMATILLQNLLIQLDEQLGRVSKEKNLLLIHNLKRIRKVLQGKFHGNPMHVAVVISNCLREERRILAAANMPVQGPLEKSLQSSSVSERQRNVEHKVAAIKNSVQMTEQDTKYLEDLQDEFDYRYKTIQTMDQSDKNSAMVNQEVLTLQEMLNSLDFKRKEALSKMTQIIHETDLLMNTMLIEELQDWKRRQQIACIGGPLHNGLDQLQNCFTLLAESLFQLRRQLEKLEEQSTKMTYEGDPIPMQRTHMLERVTFLIYNLFKNSFVVERQPCMPTHPQRPLVLKTLIQFTVKLRLLIKLPELNYQVKVKASIDKNVSTLSNRRFVLCGTNVKAMSIEESSNGSLSVEFRHLQPKEMKSSAGGKGNEGCHMVTEELHSITFETQICLYGLTIDLETSSLPVVMISNVSQLPNAWASIIWYNVSTNDSQNLVFFNNPPPATLSQLLEVMSWQFSSYVGRGLNSDQLHMLAEKLTVQSSYSDGHLTWAKFCKEHLPGKSFTFWTWLEAILDLIKKHILPLWIDGYVMGFVSKEKERLLLKDKMPGTFLLRFSESHLGGITFTWVDHSESGEVRFHSVEPYNKGRLSALPFADILRDYKVIMAENIPENPLKYLYPDIPKDKAFGKHYSSQPCEVSRPTERGDKGYVPSVFIPISTIRSDSTEPHSPSDLLPMSPSVYAVLRENLSPTTIETAMKSPYSAE

SEQ ID NO: 215 - DNA, 2735 bp, homo sapiens
agtcattgccgaggaaggcttgcacagggtgaaagctttgcttctctgctgctgtaacagggactagcacagacacacggatgagtggggtcatttccagatattaggtcacagcagaagcagccaaaatggatccccagtgcactatgggactgagtaacattctctttgtgatggccttcctgctctctggtgctgctcctctgaagattcaagcttatttcaatgagactgcagacctgccatgccaatttgcaaactctcaaaaccaaagcctgagtgagctagtagtattttggcaggaccaggaaaacttggttctgaatgaggtatacttaggcaaagagaaatttgacagtgttcattccaagtatatgggccgcacaagttttgattcggacagttggaccctgagacttcacaatcttcagatcaaggacaagggcttgtatcaatgtatcatccatcacaaaaagcccacaggaatgattcgcatccaccagatgaattctgaactgtcagtgcttgctaacttcagtcaacctgaaatagtaccaatttctaatataacagaaaatgtgtacataaatttgacctgctcatctatacacggttacccagaacctaagaagatgagtgttttgctaagaaccaagaattcaactatcgagtatgatggtattatgcagaaatctcaagataatgtcacagaactgtacgacgtttccatcagcttgtctgtttcattccctgatgttacgagcaatatgaccatcttctgtattctggaaactgacaagacgcggcttttatcttcacctttctctatagagcttgaggaccctcagcctcccccagaccacattccttggattacagctgtacttccaacagttattatatgtgtgatggttttctgtctaattctatggaaatggaagaagaagaagcggcctcgcaactcttataaatgtggaaccaacacaatggagagggaagagagtgaacagaccaagaaaagagaaaaaatccatatacctgaaagatctgatgaagcccagcgtgtttttaaaagttcgaagacatcttcatgcgacaaaagtgatacatgtttttaattaaagagtaaagcccatacaagtattcattttttctaccctttcctttgtaagttcctgggcaacctttttgatttcttccagaaggcaaaaagacattaccatgagtaataagggggctccaggactccctctaagtggaatagcctccctgtaactccagctctgctccgtatgccaagaggagactttaattctcttactgcttcttttcacttcagagcacacttatgggccaagcccagcttaatggctcatgacctggaaataaaatttaggaccaatacctcctccagatcagattcttctcttaatttcatagattgtgttttttttttaaatagacctctcaatttctggaaaactgccttttatctgcccagaattctaagctggtgccccactgaattttgtgtacctgtgactaaacaactacctcctcagtctgggtgggacttatgtatttatgaccttatagtgttaatatcttgaaacatagagatctatgtactgtaatagtgtgattactatgctctagagaaaagtctacccctgctaaggagttctcatccctctgtcagggtcagtaaggaaaacggtggcctagggtacaggcaacaatgagcagaccaacctaaatttggggaaattaggagaggcagagatagaacctggagccacttctatctgggctgttgctaatattgaggaggcttgccccacccaacaagccatagtggagagaactgaataaacaggaaaatgccagagcttgtgaaccctgtttctcttgaagaactgactagtgagatggcctggggaagctgtgaaagaaccaaaagagatcacaatactcaaaagagagagagagagaaaaaagagagatcttgatccacagaaatacatgaaatgtctggtctgtccaccccatcaacaagtcttgaaacaagcaacagatggatagtctgtccaaatggacataagacagacagcagtttccctggtggtcagggaggggttttggtgatacccaagttattgggatgtcatcttcctggaagcagagctggggagggagagccatcaccttgataatgggatgaatggaaggaggcttaggactttccactcctggctgagagaggaagagctgcaacggaattaggaagaccaagacacagatcacccggggcttacttagcctacagatgtcctacgggaacgtgggctggcccagcatagggctagcaaatttgagttggatgattgtttttgctcaaggcaaccagaggaaacttgcatacagagacagatatactgggagaaatgactttgaaaacctggctctaaggtgggatcactaagggatggggcagtctctgcccaaacataaagagaactctggggagcctgagccacaaaaatgttcctttattttatgtaaaccctcaagggttatagactgccatgctagacaagcttgtccatgtaatattcccatgtttttaccctgcccctgccttgattagactcctagcacctggctagtttctaacatgttttgtgcagcacagtttttaataaatgcttgttacattcatttaaaaaaaaaaaaaa

SEQ ID NO: 216 - protein, 329 aa, homo sapiens
MDPQCTMGLSNILFVMAFLLSGAAPLKIQAYFNETADLPCQFANSQNQSLSELVVFWQDQENLVLNEVYLGKEKFDSVHSKYMGRTSFDSDSWTLRLHNLQIKDKGLYQCIIHHKKPTGMIRIHQMNSELSVLANFSQPEIVPISNITENVYINLTCSSIHGYPEPKKMSVLLRTKNSTIEYDGIMQKSQDNVTELYDVSISLSVSFPDVTSNMTIFCILETDKTRLLSSPFSIELEDPQPPPDHIPWITAVLPTVIICVMVFCLILWKWKKKKRPRNSYKCGTNTMEREESEQTKKREKIHIPERSDEAQRVFKSSKTSSCDKSDTCF

SEQ ID NO: 217 - DNA, 1952 bp, homo sapiens
gcatttctgcattcgaagaagaatctgagagaaacctgacgcagggagcatgggtatctggacctcaggcactgatatcttcctaagtctttgggagatttacgtgtctccaagaagccccggatggatggactttatccagcatttgggagtttgctgtttggttgctcttatttcagtgggcctcctgtctgtggccgcctgctggtttctgccatcaatcatagcggccgctgcctcctggattatcacgtgtgttctgctgtgttgctccaagcatgcacgatgttttattcttcttgtctttctctcttgtggcctgcgtgaaggcaggaatgctttgattgcagctggcacagggatcgtcatcttgggacacgtagaaaatatttttcacaactttaaaggtctcctagatggtatgacttgcaacctaagggcaaagagcttttccatacattttccacttttgaaaaaatatattgaggcaattcagtggatttatggccttgccactccactaagtgtatttgatgaccttgtttcttggaaccagaccctggcagtctctcttttcagtcccagccatgtcctggaggcacagctaaatgacagcaaaggggaagtcctgagcgtcttgtaccagatggcaacaaccacagaggtgttgtcctccctgggtcagaagctacttgcctttgcagggctttcgctcgtcctgcttggcactggcctcttcatgaagcgatttttgggcccttgtggttggaagtatgaaaacatctacatcaccagacaatttgttcagtttgatgaaagggagagacatcaacagaggccctgtgtgctcccgctgaataaggaggaaaggaggaagtatgtcatcatcccgactttctggccgactcctaaagaaaggaaaaacctggggctgtttttcctccccatacttatccatctctgcatctgggtgctgtttgcagctgtagattatctgctgtatcggctcattttctcagtgagcaagcagtttcaaagcttgccagggtttgaggttcacttgaaactgcacggagagaaacaaggaactcaagatattatccatgattcttcctttaatatatctgtgtttgaacccaactgtatcccaaaaccaaaattccttctatctgagacctgggttcctctcagtgttattcttttgatattagtgatgctgggactgttgtcctctatccttatgcaacttaaaatcctggtgtcagcatctttctaccccagcgtggagaggaagcgcatccaatatctgcatgcaaagctgcttaaaaaaagatcaaagcagccgctgggagaagtcaaaagacggctgagtctctatcttacaaagattcatttctggcttccagtcctgaaaatgattaggaagaagcaaatggacatggcaagtgcagacaagtcatgagagaccccgactactcctcagccacatcgcaccaacaattctcttcaggtctaggatggcagtcactattcatgccggataatagagaactatgtgacgcagtcctctcaggagtctgagtttacagagccaacttgcagcacctggttatgcctcctttcatctcaaagccaaagagctgccaggtaaatggttatgtggtctatgttccaaacaaaccacatgatcttgcctgtgtcacaatgtaacaagactctagctgggtcccctggtgatgagtttcagcatagaataatgttcaaggaaaagaaaacgaaaacagtttaaatctctaccacagcctcacaagcaaatgctaaggggaacatacatgtaaaaagccagcaaactatcttcaaactcttccgtccttaatgtcttccatggctattgcccccacaatggtctcttttctccctgctcccttattaaagaactctttctgaaaccc

SEQ ID NO: 218 - protein, 470 aa, homo sapiens
MGIWTSGTDIFLSLWEIYVSPRSPGWMDFIQHLGVCCLVALISVGLLSVAACWFLPSIIAAAASWIITCVLLCCSKHARCFILLVFLSCGLREGRNALIAAGTGIVILGHVENIFHNFKGLLDGMTCNLRAKSFSIHFPLLKKYIEAIQWIYGLATPLSVFDDLVSWNQTLAVSLFSPSHVLEAQLNDSKGEVLSVLYQMATTTEVLSSLGQKLLAFAGLSLVLLGTGLFMKRFLGPCGWKYENIYITRQFVQFDERERHQQRPCVLPLNKEERRKYVIIPTFWPTPKERKNLGLFFLPILIHLCIWVLFAAVDYLLYRLIFSVSKQFQSLPGFEVHLKLHGEKQGTQDIIHDSSFNISVFEPNCIPKPKFLLSETWVPLSVILLILVMLGLLSSILMQLKILVSASFYPSVERKRIQYLHAKLLKKRSKQPLGEVKRRLSLYLTKIHFWLPVLKMIRKKQMDMASADKS

SEQ ID NO: 219 - DNA, 804 bp, homo sapiens
gaaggacgcaggcagcaaagagtagtcagtcccttcttggctctgctgacactcgagcccacattccatcacctgctcccaatcatgcaggtctccactgctgcccttgccgtcctcctctgcaccatggctctctgcaaccaggtcctctctgcaccacttgctgctgacacgccgaccgcctgctgcttcagctacacctcccgacagattccacagaatttcatagctgactactttgagacgagcagccagtgctccaagcccagtgtcatcttcctaaccaagagaggccggcaggtctgtgctgaccccagtgaggagtgggtccagaaatacgtcagtgacctggagctgagtgcctgaggggtccagaagcttcgaggcccagcgacctcagtgggcccagtggggaggagcaggagcctgagccttgggaacatgcgtgtgacctctacagctacctcttctatggactggttattgccaaacagccacactgtgggactcttcttaacttaaattttaatttatttatactatttagtttttataatttatttttgatttcacagtgtgtttgtgattgtttgctctgagagttccccctgtcccctccaccttccctcacagtgtgtctggtgacaaccgagtggctgtcatcggcctgtgtaggcagtcatggcaccaaagccaccagactgacaaatgtgtatcagatgcttttgttcagggctgtgatcggcctggggaaataataaagatgttcttttaaacggtaaaaaaaaaaaaaaaaaaaaaaaa

SEQ ID NO: 220 - protein, 93 aa, homo sapiens
MQVSTAALAVLLCTMALCNQVLSAPLAADTPTACCFSYTSRQIPQNFIADYFETSSQCSKPSVIFLTKRGRQVCADPSEEWVQKYVSDLELSA

SEQ ID NO: 221 - DNA, 804 bp, homo sapiens; identical to SEQ ID NO: 219

SEQ ID NO: 222 - protein, 93 aa, homo sapiens; identical to SEQ ID NO: 220

SEQ ID NO: 223 - DNA, 804 bp, homo sapiens; identical to SEQ ID NO: 219

SEQ ID NO: 224 - protein, 93 aa, homo sapiens; identical to SEQ ID NO: 220

SEQ ID NO: 225 - DNA, 4131 bp, homo sapiens
ggtgcgcgccgcggcttgggggagagttgagcgcttttcccccctcttttttttttttttcctcttcttcttaaacaaaccacaaacggatgtgagggaaggaaggtgtttcttttactcctgagcccagacacctcactctgttccgtctaagcttgttttgctgaacacttttttttaaaaaaggaaaaagaaaaggagttgcttgatgtgagagtgaaatggacgtaagattttatccacctccagcccagcccgccgctgcgcccgacgctccctgtctgggaccttctccctgcctggacccctactattgcaacaagtttgacggtgagaacatgtatatgagcatgacagagccgagccaggactatgtgccagccagccagtcctaccctggtccaagcctggaaagtgaagacttcaacattccaccaattactcctccttccctcccagaccactcgctggtgcacctgaatgaagttgagtctggttaccattctctgtgtcaccccatgaaccataatggcctgctaccatttcatccacaaaacatggacctccctgaaatcacagtctccaatatgctgggccaggatggaacactgctttctaattccatttctgtgatgccagatatacgaaacccagaaggaactcagtacagttcccatcctcagatggcagccatgagaccaaggggccagcctgcagacatcaggcagcagccaggaatgatgccacatggccagctgactaccattaaccagtcacagctaagtgctcaacttggtttgaatatgggaggaagcaatgttccccacaactcaccatctccacctggaagcaagtctgcaactccttcaccatccagttcagtgcatgaagatgaaggcgatgatacctctaagatcaatggtggagagaagcggcctgcctctgatatggggaaaaaaccaaaaactcccaaaaagaagaagaagaaggatcccaatgagccccagaagcctgtgtctgcctatgcgttattctttcgtgatactcaggccgccatcaagggccaaaatccaaacgctacctttggcgaagtctctaaaattgtggcttcaatgtgggacggtttaggagaagagcaaaaacaggtctataaaaagaaaaccgaggctgcgaagaaggagtacctgaagcaactcgcagcatacagagccagccttgtatccaagagctacagtgaacctgttgacgtgaagacatctcaacctcctcagctgatcaattcgaagccgtcggtgttccatgggcccagccaggcccactcggccctgtacctaagttcccactatcaccaacaaccgggaatgaatcctcacctaactgccatgcatcctagtctccccaggaacatagcccccaagccgaataaccaaatgccagtgactgtctctatagcaaacatggctgtgtcccctcctcctcccctccagatcagcccgcctcttcaccagcatctcaacatgcagcagcaccagccgctcaccatgcagcagccccttgggaaccagctccccatgcaggtccagtctgccttacactcacccaccatgcagcaaggatttactcttcaacccgactatcagactattatcaatcctacatctacagctgcacaagttgtcacccaggcaatggagtatgtgcgttcggggtgcagaaatcctcccccacaaccggtggactggaataacgactactgcagtagtgggggcatgcagagggacaaagcactgtaccttacttgagaatctgaacacctcttctttccactgaggaattcagggaagtgttttcaccatggattgctttgtacagtcaaggcagttctccattttattagaaaatacaagttgctaagcacttaggaccatttgagcttgtgggtcacccactctggaagaaatagtcatgcttctttattatttttttaatcctttatggacattgtttttcttcttccctgaaggaaatttggaccattcagattttatgttggttttttgctgtgaagtgctgcgctctagtaactgccttagcaactgtagatgtctcggataaaagtcctggattttccattggttttcataatgggtgtttatatgaaactactaaagactttttaaatggcttgatgtagcagtcatagcaagtttgtaaatagcatctatgttacactctcctagagtataaaatgtgaatgtttttgtagctaaattgtaattgaaactggctcattccagtttattgatttcacaataggggttaaattggcaaacattcatatttttacttcatttttaaaacaactgactgatagttctatattttcaaaatatttgaaaataaaaagtattcccaagtgattttaatttaaaaacaaattggctttgtctcattgatcagacaaaaagaaactagtattaagggaagcgcaaacacatttattttgtactgcagaaaaattgcttttttgtatcactttttgtgtaatggttagtaaatgtcatttaagtccttttatgtataaaactgccaaatgcttacctggtattttattagatgcagaaacagattggaaacagctaaattacaacttttacatatggctctgtcttattgtttcttcatactgtgtctgtatttaatctttttttatggaacctgttgcgcctatttatgaaataataaatataggtgtttgtaagtaaatttgttagtatttgaaagaggtttctttgatgttttaacttttgctggcaaaaaaaaattcacgcttggtgtgaatactttattatttagtttttacagtaacatgaataaagccaaacctgcttttcatttagcagcaaattaaagtaaccagtccttatttctgcatttctttggttgatgcaaacaaaaaactattatatttaagaactttatttcttcatacgacataacagaattgccctccaagtcacacaagctccaagactaaacaaacagacaggtcctctgtcttaaaaaggttacttcttggttctcagctggttctagtcaattctgaaccaccaccccccgccccccgcaaaaaagtaaaagtcaaaccaaacttcctcaagctgcatgcttttcacaaaatccagaaagcatttaagaattgaactaggggctggaagaagtgaaagggaagcatctaaaaatgaaaggtgagtaaccagatagcaaaagaaaagggaaagccatccaaatttgaaagctgttgatagaaattgagattcttgctgtcttttgtgcctctacaagctactactcattccagaattcctgggtcttccaagaggattcttaaggtaccagagatttgctagggaaccaaaagtgcttgagaatctgcctgagggcttgcatagctttcacattaaaaaaagaaaaagctagcagatttactcctttttaggggatcatatcaagaaagttagtctggttggaaaccaagagaatggctgatgtctctttcttggaatatgtgaaataaatttagcagtttaactaaatacaaatatatgcattgtgtaatccactcagaattaaacagacaaaaggtatgcttgctttggaatgattttaggcattgtacaaccttgaatcacttgagcatgtaataactaataaataatgcagatccatgtgattattaaaatgactgtagctgagagctctaattttcctgtcttgaaactgtataagaactcatgtgattaagttcacagtttattgtttgtctgtttagtattttagaaatataccagcactactaattaactaatgtcttttatttattatattatgataaagtaaaaatttcacttgcattaagtctaaactgagaaggtaattactgggaggagaatgagcagctttgactttgacaggcggtttgtgcaggaaagcacagtgccgtgttgtttacagcttttctagagcagctgtgcgaccagggtagagagtgttgaaattcaataccaaatacagtaaaaacaaatgtaaataaaagaaaacacatcatcaataaaactgttattatgcgtg

SEQ ID NO: 226 - protein, 526 aa, homo sapiens
MDVRFYPPPAQPAAAPDAPCLGPSPCLDPYYCNKFDGENMYMSMTEPSQDYVPASQSYPGPSLESEDFNIPPITPPSLPDHSLVHLNEVESGYHSLCHPMNHNGLLPFHPQNMDLPEITVSNMLGQDGTLLSNSISVMPDIRNPEGTQYSSHPQMAAMRPRGQPADIRQQPGMMPHGQLTTINQSQLSAQLGLNMGGSNVPHNSPSPPGSKSATPSPSSSVHEDEGDDTSKINGGEKRPASDMGKKPKTPKKKKKKDPNEPQKPVSAYALFFRDTQAAIKGQNPNATFGEVSKIVASMWDGLGEEQKQVYKKKTEAAKKEYLKQLAAYRASLVSKSYSEPVDVKTSQPPQLINSKPSVFHGPSQAHSALYLSSHYHQQPGMNPHLTAMHPSLPRNIAPKPNNQMPVTVSIANMAVSPPPPLQISPPLHQHLNMQQHQPLTMQQPLGNQLPMQVQSALHSPTMQQGFTLQPDYQTIINPTSTAAQVVTQAMEYVRSGCRNPPPQPVDWNNDYCSSGGMQRDKALYLT

SEQ ID NO: 227 - DNA, 4366 bp, homo sapiens
tgcattctttgccccaaaactctttcctttggttgtgctaagaggtgatgcccaaggtgcaccacctttcaagaactggatcatgaacaactttatcctcctggaagaacagctcatcaagaaatcccaacaaaagagaagaacttctccctcgaactttaaagtccgcttctttgtgttaaccaaagccagcctggcatactttgaagatcgtcatgggaagaagcgcacgctgaaggggtccattgagctctcccgaatcaaatgtgttgagattgtgaaaagtgacatcagcatcccatgccactataaatacccgtttcaggtggtgcatgacaactacctcctatatgtgtttgctccagatcgtgagagccggcagcgctgggtgctggcccttaaagaagaaacgaggaataataacagtttggtgcctaaatatcatcctaatttctggatggatgggaagtggaggtgctgttctcagctggagaagcttgcaacaggctgtgcccaatatgatccaaccaagaatgcttcaaagaagcctcttcctcctactcctgaagacaacaggcgaccactttgggaacctgaagaaactgtggtcattgccttatatgactaccaaaccaatgatcctcaggaactcgcactgcggcgcaacgaagagtactgcctgctggacagttctgagattcactggtggagagtccaggacaggaatgggcatgaaggatatgtaccaagcagttatctggtggaaaaatctccaaataatctggaaacctatgagtggtacaataagagtatcagccgagacaaagctgaaaaacttcttttggacacaggcaaagaaggagccttcatggtaagggattccaggactgcaggaacatacaccgtgtctgttttcaccaaggctgttgtaagtgagaacaatccctgtataaagcattatcacatcaaggaaacaaatgacaatcctaagcgatactatgtggctgaaaagtatgtgttcgattccatccctcttctcatcaactatcaccaacataatggaggaggcctggtgactcgactccggtatccagtttgttttgggaggcagaaagccccagttacagcagggctgagatacgggaaatgggtgatcgacccctcagagctcacttttgtgcaagagattggcagtgggcaatttgggttggtgcatctgggctactggctcaacaaggacaaggtggctatcaaaaccattcgggaaggggctatgtcagaagaggacttcatagaggaggctgaagtaatgatgaaactctctcatcccaaactggtgcagctgtatggggtgtgcctggagcaggcccccatctgcctggtgtttgagttcatggagcacggctgcctgtcagattatctacgcacccagcggggactttttgctgcagagaccctgctgggcatgtgtctggatgtgtgtgagggcatggcctacctggaagaggcatgtgtcatccacagagacttggctgccagaaattgtttggtgggagaaaaccaagtcatcaaggtgtctgactttgggatgacaaggttcgttctggatgatcagtacaccagttccacaggcaccaaattcccggtgaagtgggcatccccagaggttttctctttcagtcgctatagcagcaagtccgatgtgtggtcatttggtgtgctgatgtgggaagttttcagtgaaggcaaaatcccgtatgaaaaccgaagcaactcagaggtggtggaagacatcagtaccggatttcggttgtacaagccccggctggcctccacacacgtctaccagattatgaatcactgctggaaagagagaccagaagatcggccagccttctccagactgctgcgtcaactggctgaaattgcagaatcaggactttagtagagactgagtaccaggccacgggctgcagatcctgaatggaggaaggatatgtcctcattccatagagcattagaagctgccaccagcccaggaccctccagaggcagcctggcctgtggcatcagtccctgagtcaccatggaagcagcatcctgaccacagctggcagtcaagccacagctggagggtcagccaccaagctgggagctgagccagaacaggagtgatgtctctgcccttcctctagcctcttgtcacatgtggtgcacaaacctcaacctgacagctttcagacagcattcttgcacttcttagcaacagagagagacatgagtaagacccagattgctatttttattgttatttttaacatgaatctaaagtttatggttccagggactttttatttgacccaacaacacagtatcccaggatatggaggcaaggggaacaaagagcatgagtctttttccaagaaaactggtgagttaagtaagattagagtgagtgtgctctgttgctgtgatgctgtcagccacagcttcctgccgtagagaatgatagagcagctgctcacacaggaggccggatattctgagaagcagctttatgaggttttacagagtatgctgctacctctctccttgaagggagcatggcgagacccattggatggattggggtgaacagttcaggtcccatgcttggagcattgggtatctgatgtctgcaccagaacaagagaacctctgacggtggagaaccatgtggtgcaagaagagatcttaggtctcttcttttataccaagctcatcttttataccaagctgtgcaggtgactatgcctcctcttctgcacagaatgcttccaccagcatcctgagaagaaatgattacttctgaaaaacatccttttttccagcctctgggaatcagccccccctctctgcactatccgatcctcatcaacagagggcagcattgtgttggtcaatgttcccttggcgagcaattgaaacttgtttaggccctagggttgagcaattttaaggttgagactccaagtctcctaaaattctaggagagaaataaagagtctgtttttgctcaaaccatcaggatggaaacagtcaggcactgactggggtgcttccaagaggcatgagagtgcctactctggcttgagcacttctatatgcaaggtgaatatgtactgagctaggagacttccctgcaaaatctctgttcaccctgggttcacatccccatgaggtaatattattattcccattttacaaataatgtaactgaggctttaaaaagccaagacatctgcccaaagtgatggaactagaaagtctagagctggtattctagcccaaatctgtctgaccgcaatacacagattctttattcctattcgacactggcttctactgaaaatgaaacggattgcagagggaataaatacaaagatggaaagccagtaaagaagtcagtatagaaccactagcgaatagtgttgctctggcacagaccactgtggttgatggcatggccctccaacttggaataggattttccttttcctattctgtatccttaccttggtcatgttaatgactttggagttattcagttaatgaccctttaattctcacaaccaaccagtcatgttgcttgaagccatttatagacgagcttcaaagcaactttaaaagattcttctgtagaagtatgagttcttcctttaattatcattccaactttcagctgtagtcttcttgaacacttcatgaggagggacattccctgatataagagaggatggtgttgcaattggctctttctaaatcatgtgacgttttgactggcttgagattcagatgcataatttttaattataattattgtgaagtggagagcctcaagataaaactctgtcattcagaagatgattttactcagcttatccaaaattatctctgtttactttttagaattttgtacattatcttttgggatccttaattagagatgatttctggaacattcagtctagaaagaaaacattggaattgactgatctctgtggtttggtttagaaaattcccctgtgcatggtattacctttttcaagctcagattcatctaatcctcaactgtacatgtgtacattcttcacctcctggtgccctatcccgcaaaatgggcttcctgcctggtttttctcttctcacattttttaaatggtcccctgtgtttgtagagaactcccttatacagagttttggttctagttttatttcgtagattttgcattttgtaccttttgagactatgtatttatatttggatcagatgcatatttattaatgtacagtcactgctagtgttcaaaataaaaatgttacaaat

SEQ ID NO: 228 - protein, 620 aa, homo sapiens
MNNFILLEEQLIKKSQQKRRTSPSNFKVRFFVLTKASLAYFEDRHGKKRTLKGSIELSRIKCVEIVKSDISIPCHYKYPFQVVHDNYLLYVFAPDRESRQRWVLALKEETRNNNSLVPKYHPNFWMDGKWRCCSQLEKLATGCAQYDPTKNASKKPLPPTPEDNRRPLWEPEETVVIALYDYQTNDPQELALRRNEEYCLLDSSEIHWWRVQDRNGHEGYVPSSYLVEKSPNNLETYEWYNKSISRDKAEKLLLDTGKEGAFMVRDSRTAGTYTVSVFTKAVVSENNPCIKHYHIKETNDNPKRYYVAEKYVFDSIPLLINYHQHNGGGLVTRLRYPVCFGRQKAPVTAGLRYGKWVIDPSELTFVQEIGSGQFGLVHLGYWLNKDKVAIKTIREGAMSEEDFIEEAEVMMKLSHPKLVQLYGVCLEQAPICLVFEFMEHGCLSDYLRTQRGLFAAETLLGMCLDVCEGMAYLEEACVIHRDLAARNCLVGENQVIKVSDFGMTRFVLDDQYTSSTGTKFPVKWASPEVFSFSRYSSKSDVWSFGVLMWEVFSEGKIPYENRSNSEVVEDISTGFRLYKPRLASTHVYQIMNHCWKERPEDRPAFSRLLRQLAEIAESGL

SEQ ID NO: 229 - DNA, 6344 bp, homo sapiens
atgcattaaactccaggtattttcagggaggaatcatgaagccgctcctgttaaatcatatccattttattacgtctctccttgtggattacgtagaactttggaaaattaaacattagacatcttcatagaaaatcatgtcactgatttttaaagccagctcaatttaacctgccactgattccctaaccagctcttctctgactgtatcccgagggaaaatgtattgaacgcagcagaaggttaaggcagaggagttcggctagaccgggtagcagccaatcagatggggagggtccaaggatctgatgcctccaggcgagcagcgccaagctgagctggttagtctccttttattgtggatgaacaccacgtacatgccgtaaatgctccctaggctggctgcggctacaaggcagacccgggagctgagaatagaggaatacctgcccaagcaactcattctgcacagcagccgacaagacagcgattttcctgtgctggaatgtgcccatccaaagacacttggattggacttaatcttaaacctctggagttcaagaccttttaaaaagggctaaataaacaatctctacatgtaaaaggccactgactcctacttcctctgtatagagcaactgttgaactcagctgcctgtagggcgtgattctcagtcaccagactcagcttggagatcttacaatgatggcaatcaggagacactgaacggagatgctacatattcctctcttgcagcaaaaggttttagaagcgttcgaccaaacctacaagataaaagatcaccaactcagagccagataacagtgaatggaaactcaggaggtgccgtgagtcccatgagttactatcagaggccgttttccccctcggcatattctctcccagcctcactcaactccagcattgtcatgcagcacggcacatccctcgattccacagacacatatccccagcatgcgcagtctctggatggcaccaccagcagctctatccccctgtaccgatcctcagaggaagagaagagagtgacagtcatcaaagccccgcattacccagggatcgggcccgtggatgaatccggaatccccacagcaattagaacgacagtcgaccggcccaaggactggtacaagacgatgtttaagcaaattcacatggtgcacaagccggatgatgacacagacatgtataatactccttatacatacaatgcaggtctgtacaacccaccctacagtgctcagtcacaccctgctgcaaagacccaaacctacagacctctttccaaaagccactccgacaacagccccaatgcctttaaggatgcgtcctccccagtgcctcccccacatgttccacctccagtcccgccgcttcgaccaagagatcggtcttcaacagaaaagcatgactgggatcctccagacagaaaagtggacacaagaaaatttcggtctgagccaaggagtatttttgaatatgaacctggcaagtcatcaattcttcagcatgaaagaccagcctccttgtatcagtcctctatagacagaagcctggaaagacccatgagttctgcaagcatggccagtgacttcaggaagcggaggaagagcgagcctgcagtgggtccaccacggggcttgggagatcaaagtgcgagcaggactagcccaggccgagtggacctcccaggatcaagcaccactcttacaaagtctttcactagctcttctccttcttccccatcaagagcaaaaggtggggatgatagcaaaatatgtccatccctttgcagttactcagggctcaacggcaacccctccagtgagttagattactgtagcacttacagacagcacttggatgtccctcgggactcaccaagagccattagtttcaagaacggctggcaaatggcccggcaaaacgcagaaatctggagcagcacggaagaaaccgtctctcccaaaatcaaatcccggagctgtgacgatctcctaaacgacgactgcgatagcttcccggacccgaaagtcaagtcggaaagcatgggctccctgttatgtgaggaggactccaaggagagctgccccatggcgtgggggtccccctacgtcccggaggttcgcagtaacggcagatcaaggatcagacacaggtcagcccgcaacgccccggggttcctgaagatgtacaagaaaatgcaccgcatcaaccgcaaggacctgatgaactccgaggtgatctgctccgtgaagtccaggattctgcagtacgagagcgagcagcagcacaaggacctgctgcgcgcctggagccagtgctccacggaggaggtgccccgggacatggtgcccacacgcatctccgaattcgaaaagctgatccagaagtccaaatccatgccaaatttaggggatgacatgctgtctcccgtaaccctagaaccaccgcaaaatggcctatgtcccaagaggcggttttccattgagtatttgctggaggaagaaaatcaaagcggcccccccgctcggggccggcgaggctgccagtctaacgccctggtgcccattcacattgaagtcaccagcgatgagcagccccgagcacacgtggagttttccgacagcgaccaggacggggttgtgtccgaccacagtgactacattcacctagaggggtcatccttctgcagtgaaagtgactttgatcacttttccttcacatcctccgaaagcttttacggatccagccaccaccaccaccatcaccaccaccaccaccaccgccacctcatcagctcctgcaaaggcaggtgcccggcctcctacactcgatttaccacaatgttaaaacacgaaagagccagacacgaaaacaccgaggagcccagaaggcaagaaatggaccctggcctttctaaacttgcttttctagtcagtcctgtgcctttccggaggaaaaaaaattcggctcctaagaaacagactgaaaaggcaaaatgtaaagcatctgtgtttgaggctctggactctgcccttaaagacatctgtgaccaaattaaagctgaaaagaaaagggggagcttgccggacaacagcatcctgcaccgcctcatcagtgagctgctgccagatgttcccgagaggaactcatccctgagagcgctgaggaggagccccctgcaccagcctctccacccactgcctcccgatggtgctattcattgtccaccctaccagaatgactgcgggagaatgccccgcagtgcctctttccaagacgtggacacagccaacagcagctgccaccaccaagaccgtggcggtgcactccaagaccgtgagtcccctagaagttactcatccactttgactgacatggggagaagtgcaccaagggaaagaagaggaactccagaaaaagagaaattgcctgcaaaagctgtttatgattttaaggctcagacatctaaggagttgtcatttaagaaaggagatactgtctacatcctcaggaaaattgatcaaaattggtatgagggagaacaccacgggagagtgggcatcttcccgatctcatacgtagagaaactcacacctcctgagaaagcacagcctgcaagaccacctccgccagcccagcccggagaaatcggagaagctatagccaaatacaacttcaacgcagacacaaatgtggagctgtcactgagaaagggagatagagttattcttcttaaaagagttgatcaaaactggtatgaaggtaaaatcccaggaaccaacagacaaggcatcttccctgtttcctatgtggaggtcgtcaagaagaacacaaaaggtgctgaggactaccctgaccctccaataccccacagctattctagtgataggattcacagcttgagctcaaataagccacagcgtcctgtgtttactcatgaaaatattcaaggtgggggggaaccgtttcaggctctgtataactatactcccaggaatgaagatgagctggagctcagagaaagtgatgtcattgatgtcatggaaaagtgtgatgacggctggtttgtggggacctcaagaagaaccaaattctttggtactttccccggaaactacgtcaagaggctgtgaattgcgctccctccttctgtagaggccgcctgccagccatgcacctgcgtcaacgcgcctgaaacaccccgcgggcctcccgttgtcatgccttacggtttccaatgcgccgtcaccatctccacctgccaccaaaccaccagcagagtagccgccgctgctgtgagcctggggacgacatggcaggctggtccccctccgtgaaagtgtggattcctacttcctgctctaagctttgacacgtcaaaatgtgggatcagaaagaaaaaaatcatgatatttaaaaatggtcaaatatttgaggcaaaaaaaaaaaaaaaaagtgtctccaggaggctgtccagcctcgtggctccatttcaacatctccccccaggcgatgttctcccccaagacgaccagaaaattgtttattggggaatgctgtggtttgcattttcatattcttcgcttggcagtgtgtattcttttcacaagtttgcctagtgtcttggtttacacaatatgacaactgtaactgtactttagctattgtttgcctgcacatacatgttgtaatatgcacagtgattacaacctttaaagcaagaggaggcgagttaatttggatgagtgtgattttgctgattgaatgtgagttttcaaataggagtctttttctgcaatttgtttgcattttttagaagtgcaaacagtaagtaaataaaagccttcggtaataatcatgacaatacaagaggctgagctaggctacaggggaaaactattgtgttgtaaagttgcatcgctattttatattaaaatgtaatgatcagcatcatgaacaatgagctcttagtgttttatttatctgaaaaaatgtaagtaaaagcagtgttagtgagaggtgcaaagaattattctaacagacacctgaaagtatctgtaagcaatactagtaggtaagatttcactgtgtgtacacatacacatttgagattgtatgagaacatataatccatatgatatgttgtacattttatggaaatgtaatagaatctcacacattattttatagaaatagagtacagaagcatcacaagtattaaagttggttttagcaaggattaggattactacaattatttttactataataattatttttcttctatggaactcagaatcctggctacatttgaggacaggaatatgttgagcctgattttcctggtgtgtgtaaaatatttcctaggaataaattaggcactttttagaagcaatgttaaatcattcaggttttattttctgccctgaagcagaaatttaaaaaatgatattgggacctggaaggtttaatatggttcacagtgcctgaattacacctgctccgaaaactagctttgtatttcttatgactttgcataagaactgttcatctttggatcttgagcaccttacagataaaactttttatggcatctctttcatggacagtgatattgatcttttcacaatgtacgtagcctctagaattttgtacatatgtttgctctttttttgtacagactagttgttgagaaaacaggggcgtttcctaatttggtctttatcctgcgacaacactttcagcagactagcctctccttatctcacagatcacaagcacccctagatagtgtgattctgtcagatagcatttatgcaaaaatctatgaagttaaaagatcgtagaagccaaatgaaatgtacatatctactgactgatgacaagggaatttcattaggaagaaggtaaagaaacatcgttgagtagcctaccttgatttctgtcaagttcataaccagcttcatattttaaaggcttcaggtttgaaattaagtcaactgcatgcagctttgctgataaatgaataattctctttgatgccatttatgagaaaagacttcaatatctgttgcctgtcatatttaagaaaaattactgtttctactctctgtatctgattttaaaagaaaaaactattcatacctggcttccaggtaattgactttgaattcttacaagcaaaggtcattgtgtttttcttgaatagacatctaataaattttgcttggaagtatacttcagtttttcttcttgacatttatctttataaaaattgtgtattttattccaacttgttaaactaagagaaaatgca

SEQ ID NO: 230 - protein, 1100 aa, homo sapiens
MSYYQRPFSPSAYSLPASLNSSIVMQHGTSLDSTDTYPQHAQSLDGTTSSSIPLYRSSEEEKRVTVIKAPHYPGIGPVDESGIPTAIRTTVDRPKDWYKTMFKQIHMVHKPDDDTDMYNTPYTYNAGLYNPPYSAQSHPAAKTQTYRPLSKSHSDNSPNAFKDASSPVPPPHVPPPVPPLRPRDRSSTEKHDWDPPDRKVDTRKFRSEPRSIFEYEPGKSSILQHERPASLYQSSIDRSLERPMSSASMASDFRKRRKSEPAVGPPRGLGDQSASRTSPGRVDLPGSSTTLTKSFTSSSPSSPSRAKGGDDSKICPSLCSYSGLNGNPSSELDYCSTYRQHLDVPRDSPRAISFKNGWQMARQNAEIWSSTEETVSPKIKSRSCDDLLNDDCDSFPDPKVKSESMGSLLCEEDSKESCPMAWGSPYVPEVRSNGRSRIRHRSARNAPGFLKMYKKMHRINRKDLMNSEVICSVKSRILQYESEQQHKDLLRAWSQCSTEEVPRDMVPTRISEFEKLIQKSKSMPNLGDDMLSPVTLEPPQNGLCPKRRFSIEYLLEEENQSGPPARGRRGCQSNALVPIHIEVTSDEQPRAHVEFSDSDQDGVVSDHSDYIHLEGSSFCSESDFDHFSFTSSESFYGSSHHHHHHHHHHHRHLISSCKGRCPASYTRFTTMLKHERARHENTEEPRRQEMDPGLSKLAFLVSPVPFRRKKNSAPKKQTEKAKCKASVFEALDSALKDICDQIKAEKKRGSLPDNSILHRLISELLPDVPERNSSLRALRRSPLHQPLHPLPPDGAIHCPPYQNDCGRMPRSASFQDVDTANSSCHHQDRGGALQDRESPRSYSSTLTDMGRSAPRERRGTPEKEKLPAKAVYDFKAQTSKELSFKKGDTVYILRKIDQNWYEGEHHGRVGIFPISYVEKLTPPEKAQPARPPPPAQPGEIGEAIAKYNFNADTNVELSLRKGDRVILLKRVDQNWYEGKIPGTNRQGIFPVSYVEVVKKNTKGAEDYPDPPIPHSYSSDRIHSLSSNKPQRPVFTHENIQGGGEPFQALYNYTPRNEDELELRESDVIDVMEKCDDGWFVGTSRRTKFFGTFPGNYVKRL

SEQ ID NO: 231 - DNA, 4356 bp, homo sapiens
gccggggaggcgcgctcgctccgcgctcccttcgctcgctcgttccctcctccctcggcagccgcggcggcagcaggagaaggcggcggcggcggctagggatcagacatggcggcggatctgaacctggagtggatctccctgccccggtcctggacttacgggatcaccaggggcggccgagtcttcttcatcaacgaggaggccaagagcaccacctggctgcaccccgtcaccggcgaggcggtggtcaccggacaccggcggcagagcacagatttgcctactggctgggaagaagcatatacttttgaaggtgcaagatactatataaaccataatgaaaggaaagtgacctgcaaacatccagtcacaggacaaccatcacaggacaattgtatttttgtagtgaatgaacagactgttgcaaccatgacatctgaagaaaagaaggaacggccaataagtatgataaatgaagcttctaactataacgtgacttcagattatgcagtgcatccaatgagccctgtaggcagaacttcacgagcttcaaaaaaagttcataattttggaaagaggtcaaattcaattaaaaggaatcctaatgcaccggttgtcagacgaggttggctttataaacaggacagtactggcatgaaattgtggaagaaacgctggtttgtgctttctgacctttgcctcttttattatagagatgagaaagaagagggtatcctgggaagcatactgttacctagttttcagatagctttgcttacctctgaagatcacattaatcgcaaatatgcttttaaggcagcccatccaaacatgcggacctattatttctgcactgatacaggaaaggaaatggagttgtggatgaaagccatgttagatgctgccctagtacagacagaacctgtgaaaagagtggacaagattacatctgaaaatgcaccaactaaagaaaccaataacattcccaaccatagagtgctaattaaaccagagatccaaaacaatcaaaaaaacaaggaaatgagcaaaattgaagaaaaaaaggcattagaagctgaaaaatatggatttcagaaggatggtcaagatagacccttaacaaaaattaatagtgtaaagctgaattctctgccatctgaatatgagagtgggtcagcatgccctgctcagactgtgcactacagaccaatcaacttgagcagttcagagaacaaaatagtcaatgttagcctggcagatcttagaggtggaaatcgccccaatacagggcccttatacacagaggccgatcgagtcatacagagaacaaattcaatgcagcagttggaacagtggattaaaatccagaaggggaggggtcatgaagaagaaaccaggggagtaatttcttaccaaacattaccaagaaatatgccaagtcacagagcccagattatggcccgctaccctgaaggttatagaacactcccaagaaacagcaagacaaggcctgaaagtatctgcagtgtaaccccttccactcatgacaagacattaggacccggagcggaggagaaacggaggtccatgagagatgacacaatgtggcagctctacgaatggcagcagcgtcagttttataacaaacagagcaccctccctcgacacagtactttgagtagtcccaaaaccatggtaaatatttctgaccagacaatgcactctattcccacatcaccttcccacgggtcaatagctgcttatcagggatactcccctcaacgaacttacagatcggaagtgtcttcaccaattcagagaggagatgtgacaatagaccgcagacacagggcccatcaccctaagcatgtctatgtgcctgacagaaggtcagtgccagctggcctgactttacagtctgttagtccccagagcctccaagggaaaacgctgtcacaagatgaaggtagaggcacattatacaaatacagacctgaagaagtagatattgatgccaagttaagccgattatgtgaacaagataaagtggtgcatgctctggaagagaaacttcagcaactccacaaggagaaatacacgcttgagcaagctttgctatcagccagccaagagatagaaatgcatgcagataacccagcagccattcagacagtggtgttacaaagggatgatttacaaaatggactgcttagtacgtgtcgagaactttctcgagccactgccgaattggaacgagcatggagagaatatgataagttagaatacgatgtaactgttaccaggaaccagatgcaagagcagctggatcaccttggtgaagttcagacggaatcagcaggaattcagcgtgcacagattcagaaagaactttggcgaattcaggatgtcatggaagggctgagtaaacataagcagcaaagaggtactacagaaataggtatgataggatcaaagcctttctcaacagttaagtacaaaaatgagggtccagattatagactctacaagagtgaaccagagttaacaacagtggcagaagttgatgaatctaatggagaagaaaaatcagaacctgtttcagagatagaaacttcagttgttaaaggttcccactttcctgttggagtagtccctccaagagcaaaatcaccaacacccgaatcttcgacaatagcttcctatgtaaccttgaggaaaactaagaagatgatggatctaagaacggaaagaccaagaagtgcagtggaacagctctgtttggctgaaagtactcgaccaaggatgactgtggaagagcaaatggaaagaataagaagacatcaacaagcgtgcctgagggagaagaaaaaagggttaaatgttatcggtgcttcagaccagtcacccttacaaagcccttcaaatttaagggataatccatttaggactactcagactcgaaggagggatgataaggaactggacactgccattagagaaaatgatgtaaagccagaccatgaaactcctgcaacagaaattgttcaactaaaagaaaccgaaccccaaaatgtggacttcagcaaagagttaaaaaaaactgaaaacatttcatatgaaatgctttttgaacctgagccaaatggagtaaattctgtggaaatgatggataaagaaagaaacaaagacaaaatgcctgaggatgttacattcagccctcaagatgaaacacagaccgcaaatcataaaccagaagagcatcctgaagaaaatacaaagaacagtgttgacgaacaggaagaaactgttatttcttacgaatcaactcctgaggtttctagaggaaatcaaacaatggcagtgaaaagtctgtccccatctcctgagtcctcggcatcgccagttccatccactcagccgcagctcacagaaggatcacatttcatgtgtgtgtagtcttagaagaactatactgacttctgttgaaaccattcaaagctaaagacatggaccttcagcagtgtaagaagatattgtacagtatattttaaatctatgaaattcatagttctgatgcttttggtcacagagcatcattttatcacttctggaaaatgtttattccaaaacagctttaatggcccatatgtacacttcgtaatctcaaggttattattctgacaccagcttgctgctatgatttcagagcacataagtaaaggtgctttttaatgtgcagtctatttccagagcttacttagttgctgatttccagatttcgatgtttcttaagtctaggtgaatttatatatatatttttttgcttttcattttctaaagttagttattatttccattgaagcttgttttcttttttttcttcccattttagctactgcagtgcttttgtttcacacttgatttgtaaaaattttatatatatgtatttaaaatgtgccattttattgctaagtgaagtatgtcctgttttctgctataattctttctcggtcagattgcaatgtcagcagttactgccacactcctgtcagcttaaacacaaatgttactgcttatcttttcttaaaaaaaaaaaaaacaaagtgtaggtattttgaagtactgggcttatatttcattggaatacatgtgtacagcaataagcaggtttccaaatccggtacttagtttgtgtacaaatgtaattatgttcattgtgtatatattatacaatgagcacatgtaatgtattaaaggctacttactattgtttaaatgcaaatgttcatatctcatttctttttttatcatgttaaataaatgttgatgttcttaaaaaaaaaaaaaaaaaaa

SEQ ID NO: 232 - protein, 1116 aa, homo sapiens
MAADLNLEWISLPRSWTYGITRGGRVFFINEEAKSTTWLHPVTGEAVVTGHRRQSTDLPTGWEEAYTFEGARYYINHNERKVTCKHPVTGQPSQDNCIFVVNEQTVATMTSEEKKERPISMINEASNYNVTSDYAVHPMSPVGRTSRASKKVHNFGKRSNSIKRNPNAPVVRRGWLYKQDSTGMKLWKKRWFVLSDLCLFYYRDEKEEGILGSILLPSFQIALLTSEDHINRKYAFKAAHPNMRTYYFCTDTGKEMELWMKAMLDAALVQTEPVKRVDKITSENAPTKETNNIPNHRVLIKPEIQNNQKNKEMSKIEEKKALEAEKYGFQKDGQDRPLTKINSVKLNSLPSEYESGSACPAQTVHYRPINLSSSENKIVNVSLADLRGGNRPNTGPLYTEADRVIQRTNSMQQLEQWIKIQKGRGHEEETRGVISYQTLPRNMPSHRAQIMARYPEGYRTLPRNSKTRPESICSVTPSTHDKTLGPGAEEKRRSMRDDTMWQLYEWQQRQFYNKQSTLPRHSTLSSPKTMVNISDQTMHSIPTSPSHGSIAAYQGYSPQRTYRSEVSSPIQRGDVTIDRRHRAHHPKHVYVPDRRSVPAGLTLQSVSPQSLQGKTLSQDEGRGTLYKYRPEEVDIDAKLSRLCEQDKVVHALEEKLQQLHKEKYTLEQALLSASQEIEMHADNPAAIQTVVLQRDDLQNGLLSTCRELSRATAELERAWREYDKLEYDVTVTRNQMQEQLDHLGEVQTESAGIQRAQIQKELWRIQDVMEGLSKHKQQRGTTEIGMIGSKPFSTVKYKNEGPDYRLYKSEPELTTVAEVDESNGEEKSEPVSEIETSVVKGSHFPVGVVPPRAKSPTPESSTIASYVTLRKTKKMMDLRTERPRSAVEQLCLAESTRPRMTVEEQMERIRRHQQACLREKKKGLNVIGASDQSPLQSPSNLRDNPFRTTQTRRRDDKELDTAIRENDVKPDHETPATEIVQLKETEPQNVDFSKELKKTENISYEMLFEPEPNGVNSVEMMDKERNKDKMPEDVTFSPQDETQTANHKPEEHPEENTKNSVDEQEETVISYESTPEVSRGNQTMAVKSLSPSPESSASPVPSTQPQLTEGSHFMCV

SEQ ID NO: 233 - DNA, 14773 bp, homo sapiens
ctgggcggccgggcgcggggagagggcgcgggagcggctcgtgcggcaggtaccatgcggacgcgcgagcccggcgagggccccggcaggcccggtccctgctcgggggcgcgctgagacggcgggtgagctccacgagagcgccgtcgccacttcgggccaactttgcgattcccgacagttaagcaatggggagacatttggctttgctcctgcttctgctccttctcttccaacattttggagacagtgatggcagccaacgacttgaacagactcctctgcagtttacacacctcgagtacaacgtcaccgtgcaggagaactctgcagctaagacttatgtggggcatcctgtcaagatgggtgtttacattacacatccagcgtgggaagtaaggtacaaaattgtttccggagacagtgaaaacctgttcaaagctgaagagtacattctcggagacttttgctttctaagaataaggaccaaaggaggaaatacagctattcttaatagagaagtgaaggatcactacacattgatagtgaaagcacttgaaaaaaatactaatgtggaggcgcgaacaaaggtcagggtgcaggtgctggatacaaatgacttgagaccgttattctcacccacctcatacagcgtttctttacctgaaaacacagctataaggaccagtatcgcaagagtcagcgccacggatgcagacataggaaccaacggggaattttactacagttttaaagatcgaacagatatgtttgctattcacccaaccagtggtgtgatagtgttaactggtagacttgattacctagagaccaagctctatgagatggaaatcctcgctgcggaccgtggcatgaagttgtatgggagcagtggcatcagcagcatggccaagctaacggtgcacatcgaacaggccaatgaatgtgctccggtgataacagcagtgacattgtcaccatcagaactggacagggacccagcatatgcaattgtgacagtggatgactgcgatcagggtgccaatggtgacatagcatctttaagcatcgtggcaggtgaccttctccagcagtttagaacagtgaggtcctttccagggagtaaggagtataaagtcaaagccatcggtggcattgattgggacagtcatcctttcggctacaatctcacactacaggctaaagataaaggaactccgccccagttctcttctgttaaagtcattcacgtgacttctccacagttcaaagccgggccagtcaagtttgaaaaggatgtttacagagcagaaataagtgaatttgctcctcccaacacacctgtggtcatggtaaaggccattcctgcttattcccatttgaggtatgtttttaaaagtacacctggaaaagctaaattcagtttaaattacaacactggtctcatttctattttagaaccagttaaaagacagcaggcagcccattttgaacttgaagtaacaacaagtgacagaaaagcgtccaccaaggtcttggtgaaagtcttaggtgcaaatagcaatccccctgaatttacccagacagcgtacaaagctgcttttgatgagaacgtgcccattggtactactgtcatgagcctgagtgccgtagaccctgatgagggtgagaacgggtacgtgacatacagtatcgcaaatttaaatcatgtgccgtttgcgattgaccatttcactggtgccgtgagtacgtcagaaaacctggactacgaactgatgcctcgggtttatactctgaggattcgtgcatcagactggggcttgccgtaccgccgggaagtcgaagtccttgctacaattactctcaataacttgaatgacaacacacctttgtttgagaaaataaattgtgaagggacaattcccagagatctaggcgtgggagagcaaataaccactgtttctgctattgatgcagatgaacttcagttggtacagtatcagattgaagctggaaatgaactggatttctttagtttaaaccccaactcgggggtattgtcattaaagcgatcgctaatggatggcttaggtgcaaaggtgtctttccacagtctgagaatcacagctacagatggagaaaattttgccacaccattatatatcaacataacagtggctgccagtcacaagctggtaaacttgcagtgtgaagagactggtgttgccaaaatgctggcagagaagctcctgcaggcaaataaattacacaaccagggagaggtggaggatattttcttcgattctcactctgtcaatgctcacataccgcagtttagaagcactcttccgactggtattcaggtaaaggaaaaccagcctgtgggttccagtgtaattttcatgaactccactgaccttgacactggcttcaatggaaaactggtctatgctgtttctggaggaaatgaggatagttgcttcatgattgatatggaaacaggaatgctgaaaattttatctcctcttgaccgtgaaacaacagacaaatacaccctgaatattaccgtctatgaccttgggataccccagaaggctgcgtggcgtcttctacatgtcgtggttgtcgatgccaatgataatccacccgagtttttacaggagagctattttgtggaagtgagtgaagacaaggaggtacatagtgaaatcatccaggttgaagccacagataaagacctggggcccaacggacacgtgacgtactcaattgttacagacacagacacattttcaattgacagcgtgacgggtgttgttaacatcgcacgccctctggatcgagagctgcagcatgagcactccttaaagattgaggccagggaccaagccagagaagagcctcagctgttctccactgtcgttgtgaaagtatcactagaagatgttaatgacaacccacctacatttattccacctaattatcgtgtgaaagtccgagaggatcttccagaaggaaccgtcatcatgtggttagaagcccacgatcctgatttaggtcagtctggtcaggtgagatacagccttctggaccacggagaaggaaacttcgatgtggataaactcagtggagcagttaggatcgtccagcagttggactttgagaagaagcaagtgtataatctcactgtgagggccaaagacaagggaaagccagtttctctgtcttctacttgctatgttgaagttgaggtggttgatgtgaatgagaacctgcacccacccgtgttttccagctttgtggaaaaggggacagtgaaagaagatgcacctgttggttcattggtaatgacggtgtcggctcatgatgaggacgccagaagagatggggagatccgatactccattagagatggctctggcgttggtgttttcaaaataggtgaagagacaggtgtcatagagacgtcagatcgactggaccgtgaatcgacctcccattattggctaacagtctttgcaaccgatcagggtgtcgtgcctctttcatcgttcatagagatctacatagaggttgaggatgtcaatgacaatgcaccacagacatcagagcctgtttattacccagaaatcatggaaaattctcctaaagatgtatctgtggtccagatcgaggcatttgatccagattcgagctctaatgacaagctcatgtacaaaattacaagtggaaatccacaaggattcttttcaatacatcctaaaacaggtctcatcacaactacgtcaaggaagctagaccgagaacagcaagatgaacacatattagaggttactgtgacagacaatggtagtccccccaaatcaaccattgcaagagtcattgtgaaaatccttgatgaaaatgacaacaaacctcagtttctgcaaaagttctacaaaatcagactccctgagcgggaaaagccagaccgagaaagaaatgccagacgggagccgctctatcacgtcatagccaccgacaaggatgagggccccaatgcagaaatctcctacagcatcgaagacgggaatgagcatggcaaatttttcatcgaaccgaaaactggagtggtttcgtccaagaggttttcagcagctggagaatatgatattctttcaattaaggcagttgacaatggtcgccctcaaaagtcatcaaccaccagactccatattgaatggatctccaagcccaaaccgtccctggagcccatttcatttgaagaatcattttttacctttactgtgatggaaagtgaccccgttgctcacatgattggagtaatatctgtggagcctcctggcatacccctttggtttgacatcactggtggcaactacgacagtcacttcgatgtggacaagggaactggaaccatcattgttgccaaacctcttgatgcagaacagaagtcaaactacaacctcacagtcgaggctacagatggaaccaccactatcctcactcaggtattcatcaaagtaatagacacaaatgaccatcgtcctcagttttctacatcaaagtatgaagttgttattcctgaagatacagcgccagaaacagaaattttgcaaatcagtgctgtggatcaggatgagaaaaacaaactaatctacactctgcagagcagtagagatccactgagtctcaagaaatttcgtcttgatcctgcaaccggctctctctatacttctgagaaactggatcatgaagctgttcaccagcacaccctcacggtcatggtacgagatcaagatgtgcctgtaaaacgcaactttgcaaggattgtggtcaatgtcagcgacacgaatgaccacgccccgtggttcaccgcttcctcctacaaagggcgggtttatgaatcggcagccgttggctcagttgtgttgcaggtgacggctctggacaaggacaaagggaaaaatgctgaagtgctgtactcgatcgagtcaggaaatattggaaattcttttatgattgatcctgtcttgggctctattaaaactgccaaagaattagatcgaagtaaccaagcggagtatgatttaatggtaaaagctacagataagggcagtccaccaatgagtgaaataacttctgtgcgtatctttgtcacaattgctgacaacgcctctccgaagtttacatcaaaagaatattctgttgaacttagtgaaactgtcagcattgggagtttcgttgggatggttacagcccatagtcaatcatcagtggtgtatgaaataaaagatggaaatacaggtgatgcttttgatattaatccacattctggaactatcatcactcagaaagccctggactttgaaactttgcccatttacacattgataatacaaggaactaacatggctggtttgtccactaatacaacggttctagttcacttgcaggatgagaatgacaacgcgccagtttttatgcaggcagaatatacaggactcattagtgaatcagcctcaattaacagcgtggtcctaacagacaggaatgtcccactggtgattcgagcagctgatgctgataaagactcaaatgctttgcttgtatatcacattgttgaaccatctgtacacacatattttgctattgattctagcactggtgctattcatacagtactaagtctggactatgaagaaacaagtatttttcactttaccgtccaagtgcatgacatgggaaccccacgtttatttgctgagtatgcagcgaatgtaacagtacatgtaattgacattaatgactgcccccctgtgtttgccaagccattatatgaagcatctcttttgttaccaacatacaaaggagtaaaagtcatcacagtaaatgctacagatgctgattcaagtgcattctcacagttgatttactccatcaccgaaggcaacatcggggagaagttttctatggactacaagactggtgctctcactgtccaaaacacaactcagttaagaagccgctacgagctaaccgttagagcttccgatggcagatttgccggccttacctctgtcaaaattaatgtgaaagaaagcaaagaaagtcacctaaagtttacccaggatgtctactctgcggtagtgaaagagaattccaccgaggccgaaacattagctgtcattactgctattgggaatccaatcaatgagcctttgttttatcacatcctcaacccagatcgcagatttaaaataagccgcacttcaggagttctgtcaaccactggcacgcccttcgatcgtgagcagcaggaggcgtttgatgtggttgtagaagtgacagaggaacataagccttctgcagtggcccacgttgtcgtgaaggtcattgtagaagaccaaaatgataatgcgccggtgtttgtcaaccttccctactacgccgttgttaaagtggacactgaggtgggccatgtcattcgctatgtcactgctgtagacagagacagtggcagaaacggggaagtgcattactacctcaaggaacatcatgaacactttcaaattggacccttgggtgaaatttcactgaaaaagcaatttgagcttgacaccttaaataaagaatatcttgttacagtggttgcaaaagatggagggaacccggccttttcagcggaagttatcgttccgatcactgtcatgaataaagccatgcctgtgtttgaaaaacctttctacagtgcagagattgcagagagcatccaggtgcacagccctgtggtccacgtgcaggctaacagcccggaaggcctgaaagtgttctacagcatcacagacggagaccctttcagccagttcactattaacttcaatactggagttatcaatgtcatagctcctctggactttgaggcccacccggcatataagctgagcatacgcgcaactgactccttgacgggcgctcatgctgaagtatttgtggacatcatagtagacgacatcaatgataaccctcctgtgtttgctcagcagtcttatgcggtgaccctgtctgaggcatctgtaattggaacgtctgttgttcaagttagagccaccgattctgattcagaaccaaatagaggaatctcataccagatgtttgggaatcacagcaagagtcatgatcattttcatgtagacagcagcactggcctcatctcactactcagaaccctggattacgagcagtcccggcagcacacgatttttgtgagggcagttgatggtggtatgcccacgctgagcagtgatgtgattgtcacggtggacgttaccgacctcaatgataatccaccactctttgaacaacagatttatgaagccagaattagcgagcacgcccctcatgggcatttcgtgacctgtgtaaaagcctatgatgcagacagttcagacatagacaagttgcagtattccattctgtctggcaatgatcataaacattttgtcattgacagtgcaacagggattatcaccctctcaaacctgcaccggcacgccctgaagccattttacagtcttaacctgtcagtgtctgatggagtttttagaagttccacccaggttcatgtaactgtaattggaggcaatttgcacagtcctgctttccttcagaacgaatatgaagtggaactagctgaaaacgctcccctacataccctggtgatggaggtgaaaactacggatggggattctggtatttatggtcacgttacttaccatattgtaaatgactttgccaaagacagattttacataaatgagagaggacagatatttactttggaaaaacttgatcgagaaaccccggcggagaaagtgatctcagtccgtttaatggctaaggatgctggaggaaaagttgctttctgcaccgtgaatgtcatccttacagatgacaatgacaatgcaccacaatttcgagcaaccaaatacgaagtgaatatcgggtccagtgctgctaaagggacttcagtcgttaaagttcttgcaagtgatgccgatgagggctccaatgccgacatcacctatgccattgaagcagactctgaaagtgtaaaagagaatttggaaattaacaaactgtccggcgtaatcactacaaaggagagcctcattggcttggaaaatgaattcttcactttctttgttagagctgtggataatgggtctccatcaaaagaatctgttgttcttgtctatgttaaaatccttccaccggaaatgcagcttccaaaattttcagaacctttctatacctttacagtgtcagaggacgtgcctattggaacagagatagatctcatccgagcagaacatagtgggactgttctttacagcctggtcaaagggaatactccagaaagcaatagggatgagtcctttgtgattgacagacagagcgggagactgaagttggagaagagtcttgatcatgagacaactaagtggtatcagttttccatactggccaggtgcactcaagatgaccatgagatggtggcttctgtagatgttagtatccaagtgaaagatgcaaatgacaacagcccggtctttgaatctagtccatatgaggcattcattgttgaaaacctgccagggggaagtagagtaattcagatcagggcatctgatgctgactcaggaaccaacggccaagttatgtatagcctggatcagtcacaaagtgtggaagtcattgaatcctttgccattaacatggaaacaggctggattacaactttaaaggaacttgaccatgaaaagagagacaattaccagattaaagtggttgcatcagatcatggtgaaaagatccagctatcctccacagccattgtggatgttaccgtcaccgatgtcaacgatagtccaccacgattcacggccgagatctataaagggactgtgagtgaggatgacccccaaggtggggtgattgccatcttaagtaccacggatgctgattctgaagagatcaacagacaagttacatatttcataacaggaggggatcctttaggacagtttgccgttgaaactatacagaatgaatggaaggtatatgtgaagaaacctctagacagggaaaaaagggacaattaccttcttactatcacggcaactgatggcaccttctcatcaaaagcgatagttgaagtgaaagttctggatgcaaatgacaacagtccagtttgtgaaaagactttatattcagacactattcctgaagacgtccttcctggaaaattgatcatgcagatctctgctacagacgcagacatccgctctaacgctgaaattacttacacgttattgggttcaggtgcagaaaaattcaaactaaatccagacacaggtgaactgaaaacgtcaaccccccttgatcgtgaggagcaagctgtttatcatcttctcgtcagggccacagatggaggaggaagattctgccaagccagtattgtgctcacgctagaagatgtgaacgataacgcccccgaattctctgccgatccttatgccatcaccgtgtttgaaaacacagagccgggaacgctgctgacaagagtgcaggccacagatgccgacgcaggattaaatcggaagattttatactcactgattgactctgctgatgggcagttctccattaacgaattatctggaattattcagttagaaaaacctttggacagagaactccaggcagtatacaccctctctttgaaagctgtggatcaaggcttgccaaggaggctgactgccactggcactgtgattgtatcagttcttgacataaatgacaacccccctgtgtttgagtaccgtgaatatggtgccaccgtgtctgaggacattcttgttggaactgaagttcttcaagtgtatgcagcaagtcgggatattgaagcaaatgcagaaatcacctactcaataataagtggaaatgaacatgggaaattcagcatagattctaaaacaggggccgtatttatcattgagaatctggattatgagagctctcatgagtattacctaacagtagaggccactgatggaggcacgccttcactgagcgacgttgccactgtgaacgttaatgtaacagatatcaacgataatacccctgtgttcagccaagacacctacacgacagtcatcagtgaagatgccgttcttgagcagtctgtcatcacggttatggccgatgatgccgatggaccttccaacagccacatccactactcaattatagatggcaaccaaggaagctcgttcacaattgaccccgtcaggggagaagtcaaagtgaccaaacttctcgaccgagaaacgatttcaggttacacgctcacggttcaagcttctgataatggcagtccacccagagtcaacacgacgaccgtgaacatcgatgtgtccgatgtcaatgacaacgcgcccgtcttctccaggggaaactacagtgtcattatccaggaaaataagccagtgggcttcagcgtgctgcagctggtagtaacagatgaggattcttcccataacggtccacccttcttctttactattgtaactggaaatgatgagaaggcttttgaagttaacccgcaaggagtcctcctgacatcatctgccatcaagaggaaggagaaagatcattacttactgcaggtgaaggtggcagataatggaaagcctcagttgtcatctttgacatacattgacattagggtaattgaggagagcatctatccgcctgcgattttgcccctggagattttcatcacctcttctggagaagaatactcaggtggcgtcattgggaagatccatgccacagaccaggacgtgtatgatactctaacctacagtctcgaccctcagatggacaacctgttctctgtttccagcacagggggcaagctgatagcacacaaaaagctagacatagggcaataccttctcaatgtcagcgtaacagatgggaagttcacgacggtggccgacatcacagtgcatatcagacaagtcacacaggagatgttgaaccacaccatcgcgatccgctttgccaacctcactccggaagaattcgttggtgactactggcgcaacttccagcgagctttacggaacatcctgggtgtgaggaggaacgacatacagattgttagtttgcagtcctctgaacctcacccacatctggacgtcttactttttgtagagaaaccaggtagtgctcagatctcaacaaaacaacttctgcacaagattaactcttccgtgactgacattgaggaaatcattggagttaggatactgaatgtattccagaaactctgcgcgggactggactgcccctggaagttctgcgatgaaaaggtgtctgtggatgaaagtgtgatgtcaacacacagcacagccagactgagttttgtgactccccgccaccacagggcagcggtgtgtctctgcaaagagggaaggtgcccacctgtccaccatggctgtgaagatgatccgtgccctgagggatccgaatgtgtgtctgatccctgggaggagaaacacacctgtgtctgtcccagcggcaggtttggtcagtgcccagggagttcatctatgacactgactggaaacagctacgtgaaataccgtctgacggaaaatgaaaacaaattagagatgaaactgaccatgaggctcagaacatattccacgcatgcggttgtcatgtatgctcgaggaactgactatagcatcttggagattcatcatggaaggctgcagtacaagtttgactgtggaagtggccctggaattgtctctgttcagagcattcaggtcaatgatgggcagtggcacgcagtggccctggaagtgaatggaaactatgctcgcttggttctagaccaagttcatactgcatcgggcacagccccagggactctgaaaaccctgaacctggataactatgtgttttttggtggccacatccgtcagcagggaacaaggcatggaagaagtcctcaagttggtaatggtttcaggggttgtatggactccatttatttgaatgggcaggagctccctttaaacagcaaacccagaagctatgcacacatcgaagagtcggtggatgtatctccaggctgcttcctgacggccacggaagactgcgccagcaacccttgccagaatggaggcgtttgcaatccgtcacctgctggaggttattactgcaaatgcagtgccttgtacatagggacccactgtgagataagcgtcaatccgtgttcctccaagccatgcctctatgggggcacgtgtgttgtcgacaacggaggctttgtttgccagtgtagaggattatatactggtcagaggtgtcagcttagtccatactgcaaagatgaaccctgtaagaatggcggaacatgctttgacagtttggatggcgccgtttgtcagtgtgattcgggttttaggggagaaaggtgtcagagtgatatcgacgagtgctctggaaacccttgcctgcacggggccctctgtgagaacacgcacggctcctatcactgcaactgcagccacgagtacaggggacgtcactgcgaggatgctgcgcccaaccagtatgtgtccacgccgtggaacattgggttggcggaaggaattggaatcgttgtgtttgttgcagggatatttttactggtggtggtgtttgttctctgccgtaagatgattagtcggaaaaagaagcatcaggctgaacctaaagacaagcacctgggacccgctacggctttcttgcaaagaccgtattttgattccaagctaaataagaacatttactcagacataccaccccaggtgcctgtccggcctatttcctacaccccgagtattccaagtgactcaagaaacaatctggaccgaaattccttcgaaggatctgctatcccagagcatcccgaattcagcacttttaaccccgagtctgtgcacgggcaccgaaaagcagtggcggtctgcagcgtggcgccaaacctgcctcccccacccccttcaaactccccttctgacagcgactccatccagaagcctagctgggactttgactatgacacaaaagtggtggatcttgatccctgtctttccaagaagcctctagaggaaaagccttcccagccatacagtgcccgggaaagcctgtctgaagtgcagtctctgagctccttccagtccgaatcgtgcgatgacaatgggtatcactgggatacatcagattggatgccaagcgttcctctgccggacatacaagagttccccaactatgaggtgattgatgagcagacacccctgtactcagcagatccaaacgccatcgatacggactattaccctggaggctacgacatcgaaagtgattttcctccacccccagaagacttccccgcagctgatgagctaccaccgttaccgcccgaattcagcaatcagtttgaatccatccaccctcctagagacatgcctgccgcgggtagcttgggttcttcatcaagaaaccggcagaggttcaacttgaatcagtatttgcccaatttttatcccctcgatatgtctgaacctcaaacaaaaggcactggtgagaatagtacttgtagagaaccccatgccccttacccgccagggtatcaaagacacttcgaggcgcccgctgtcgagagcatgcccatgtctgtgtacgcctccaccgcctcctgctctgacgtgtcagcctgctgcgaagtggagtccgaggtcatgatgagtgactatgagagcggggacgacggccacttcgaagaggtgacgatcccgcccctggattcccagcagcacacggaagtctgactctcaactccccccaaagtgcctgactttagtgaacctagaggtgatgtgagtaatccgcgctgttctttgcagcagtgcttccaagctttttttggtgagccgaatgggcatggctgcgctggatcctgcgcctctggacgtgctagccatttccagtgtcccaactactgtcatcgtgaggttttcatcggctgtgccatttcccaacgtcttttgggatttacatctgtctgtgttaaaataatcaaacgaaaaatcagtcctgtgttgtcagcatgattcatgtatttatatagatttgattattttaattttcctgtctcttttttttgtaaattttatgtacagatttgatttttcatagttttaactagatttccaagatattttgtgcatttgtttcaactgaattttggtggtgtcagtgccattatctagcaccctgatttttttttttttactataaccagggtttcattctgtctttttccactgaagtgtgacattttgttagtacatttcagtgtagtcattcatttctagctgtacataggatgaaggagagatcagatacatgaacatgtcttacatgggttgctgtatttagaattataaacatttttcattattggaaagtgtaacggggaccttctgcatacctgtttagaaccaaaaccaccatgacacagtttttatagtgtctgtatatttgtgatgcaatggtcttgtaaaggtttttaatgaaaactaccattagccagtctttcttactgacaataaattattaataaaatacttgagctttaaaaaaaaaa

SEQ ID NO: 234 - protein, 4588 aa, homo sapiens
MGRHLALLLLLLLLFQHFGDSDGSQRLEQTPLQFTHLEYNVTVQENSAAKTYVGHPVKMGVYITHPAWEVRYKIVSGDSENLFKAEEYILGDFCFLRIRTKGGNTAILNREVKDHYTLIVKALEKNTNVEARTKVRVQVLDTNDLRPLFSPTSYSVSLPENTAIRTSIARVSATDADIGTNGEFYYSFKDRTDMFAIHPTSGVIVLTGRLDYLETKLYEMEILAADRGMKLYGSSGISSMAKLTVHIEQANECAPVITAVTLSPSELDRDPAYAIVTVDDCDQGANGDIASLSIVAGDLLQQFRTVRSFPGSKEYKVKAIGGIDWDSHPFGYNLTLQAKDKGTPPQFSSVKVIHVTSPQFKAGPVKFEKDVYRAEISEFAPPNTPVVMVKAIPAYSHLRYVFKSTPGKAKFSLNYNTGLISILEPVKRQQAAHFELEVTTSDRKASTKVLVKVLGANSNPPEFTQTAYKAAFDENVPIGTTVMSLSAVDPDEGENGYVTYSIANLNHVPFAIDHFTGAVSTSENLDYELMPRVYTLRIRASDWGLPYRREVEVLATITLNNLNDNTPLFEKINCEGTIPRDLGVGEQITTVSAIDADELQLVQYQIEAGNELDFFSLNPNSGVLSLKRSLMDGLGAKVSFHSLRITATDGENFATPLYINITVAASHKLVNLQCEETGVAKMLAEKLLQANKLHNQGEVEDIFFDSHSVNAHIPQFRSTLPTGIQVKENQPVGSSVIFMNSTDLDTGFNGKLVYAVSGGNEDSCFMIDMETGMLKILSPLDRETTDKYTLNITVYDLGIPQKAAWRLLHVVVVDANDNPPEFLQESYFVEVSEDKEVHSEIIQVEATDKDLGPNGHVTYSIVTDTDTFSIDSVTGVVNIARPLDRELQHEHSLKIEARDQAREEPQLFSTVVVKVSLEDVNDNPPTFIPPNYRVKVREDLPEGTVIMWLEAHDPDLGQSGQVRYSLLDHGEGNFDVDKLSGAVRIVQQLDFEKKQVYNLTVRAKDKGKPVSLSSTCYVEVEVVDVNENLHPPVFSSFVEKGTVKEDAPVGSLVMTVSAHDEDARRDGEIRYSIRDGSGVGVFKIGEETGVIETSDRLDRESTSHYWLTVFATDQGVVPLSSFIEIYIEVEDVNDNAPQTSEPVYYPEIMENSPKDVSVVQIEAFDPDSSSNDKLMYKITSGNPQGFFSIHPKTGLITTTSRKLDREQQDEHILEVTVTDNGSPPKSTIARVIVKILDENDNKPQFLQKFYKIRLPEREKPDRERNARREPLYHVIATDKDEGPNAEISYSIEDGNEHGKFFIEPKTGVVSSKRFSAAGEYDILSIKAVDNGRPQKSSTTRLHIEWISKPKPSLEPISFEESFFTFTVMESDPVAHMIGVISVEPPGIPLWFDITGGNYDSHFDVDKGTGTIIVAKPLDAEQKSNYNLTVEATDGTTTILTQVFIKVIDTNDHRPQFSTSKYEVVIPEDTAPETEILQISAVDQDEKNKLIYTLQSSRDPLSLKKFRLDPATGSLYTSEKLDHEAVHQHTLTVMVRDQDVPVKRNFARIVVNVSDTNDHAPWFTASSYKGRVYESAAVGSVVLQVTALDKDKGKNAEVLYSIESGNIGNSFMIDPVLGSIKTAKELDRSNQAEYDLMVKATDKGSPPMSEITSVRIFVTIADNASPKFTSKEYSVELSETVSIGSFVGMVTAHSQSSVVYEIKDGNTGDAFDINPHSGTIITQKALDFETLPIYTLIIQGTNMAGLSTNTTVLVHLQDENDNAPVFMQAEYTGLISESASINSVVLTDRNVPLVIRAADADKDSNALLVYHIVEPSVHTYFAIDSSTGAIHTVLSLDYEETSIFHFTVQVHDMGTPRLFAEYAANVTVHVIDINDCPPVFAKPLYEASLLLPTYKGVKVITVNATDADSSAFSQLIYSITEGNIGEKFSMDYKTGALTVQNTTQLRSRYELTVRASDGRFAGLTSVKINVKESKESHLKFTQDVYSAVVKENSTEAETLAVITAIGNPINEPLFYHILNPDRRFKISRTSGVLSTTGTPFDREQQEAFDVVVEVTEEHKPSAVAHVVVKVIVEDQNDNAPVFVNLPYYAVVKVDTEVGHVIRYVTAVDRDSGRNGEVHYYLKEHHEHFQIGPLGEISLKKQFELDTLNKEYLVTVVAKDGGNPAFSAEVIVPITVMNKAMPVFEKPFYSAEIAESIQVHSPVVHVQANSPEGLKVFYSITDGDPFSQFTINFNTGVINVIAPLDFEAHPAYKLSIRATDSLTGAHAEVFVDIIVDDINDNPPVFAQQSYAVTLSEASVIGTSVVQVRATDSDSEPNRGISYQMFGNHSKSHDHFHVDSSTGLISLLRTLDYEQSRQHTIFVRAVDGGMPTLSSDVIVTVDVTDLNDNPPLFEQQIYEARISEHAPHGHFVTCVKAYDADSSDIDKLQYSILSGNDHKHFVIDSATGIITLSNLHRHALKPFYSLNLSVSDGVFRSSTQVHVTVIGGNLHSPAFLQNEYEVELAENAPLHTLVMEVKTTDGDSGIYGHVTYHIVNDFAKDRFYINERGQIFTLEKLDRETPAEKVISVRLMAKDAGGKVAFCTVNVILTDDNDNAPQFRATKYEVNIGSSAAKGTSVVKVLASDADEGSNADITYAIEADSESVKENLEINKLSGVITTKESLIGLENEFFTFFVRAVDNGSPSKESVVLVYVKILPPEMQLPKFSEPFYTFTVSEDVPIGTEIDLIRAEHSGTVLYSLVKGNTPESNRDESFVIDRQSGRLKLEKSLDHETTKWYQFSILARCTQDDHEMVASVDVSIQVKDANDNSPVFESSPYEAFIVENLPGGSRVIQIRASDADSGTNGQVMYSLDQSQSVEVIESFAINMETGWITTLKELDHEKRDNYQIKVVASDHGEKIQLSSTAIVDVTVTDVNDSPPRFTAEIYKGTVSEDDPQGGVIAILSTTDADSEEINRQVTYFITGGDPLGQFAVETIQNEWKVYVKKPLDREKRDNYLLTITATDGTFSSKAIVEVKVLDANDNSPVCEKTLYSDTIPEDVLPGKLIMQISATDADIRSNAEITYTLLGSGAEKFKLNPDTGELKTSTPLDREEQAVYHLLVRATDGGGRFCQASIVLTLEDVNDNAPEFSADPYAITVFENTEPGTLLTRVQATDADAGLNRKILYSLIDSADGQFSINELSGIIQLEKPLDRELQAVYTLSLKAVDQGLPRRLTATGTVIVSVLDINDNPPVFEYREYGATVSEDILVGTEVLQVYAASRDIEANAEITYSIISGNEHGKFSIDSKTGAVFIIENLDYESSHEYYLTVEATDGGTPSLSDVATVNVNVTDINDNTPVFSQDTYTTVISEDAVLEQSVITVMADDADGPSNSHIHYSIIDGNQGSSFTIDPVRGEVKVTKLLDRETISGYTLTVQASDNGSPPRVNTTTVNIDVSDVNDNAPVFSRGNYSVIIQENKPVGFSVLQLVVTDEDSSHNGPPFFFTIVTGNDEKAFEVNPQGVLLTSSAIKRKEKDHYLLQVKVADNGKPQLSSLTYIDIRVIEESIYPPAILPLEIFITSSGEEYSGGVIGKIHATDQDVYDTLTYSLDPQMDNLFSVSSTGGKLIAHKKLDIGQYLLNVSVTDGKFTTVADITVHIRQVTQEMLNHTIAIRFANLTPEEFVGDYWRNFQRALRNILGVRRNDIQIVSLQSSEPHPHLDVLLFVEKPGSAQISTKQLLHKINSSVTDIEEIIGVRILNVFQKLCAGLDCPWKFCDEKVSVDESVMSTHSTARLSFVTPRHHRAAVCLCKEGRCPPVHHGCEDDPCPEGSECVSDPWEEKHTCVCPSGRFGQCPGSSSMTLTGNSYVKYRLTENENKLEMKLTMRLRTYSTHAVVMYARGTDYSILEIHHGRLQYKFDCGSGPGIVSVQSIQVNDGQWHAVALEVNGNYARLVLDQVHTASGTAPGTLKTLNLDNYVFFGGHIRQQGTRHGRSPQVGNGFRGCMDSIYLNGQELPLNSKPRSYAHIEESVDVSPGCFLTATEDCASNPCQNGGVCNPSPAGGYYCKCSALYIGTHCEISVNPCSSKPCLYGGTCVVDNGGFVCQCRGLYTGQRCQLSPYCKDEPCKNGGTCFDSLDGAVCQCDSGFRGERCQSDIDECSGNPCLHGALCENTHGSYHCNCSHEYRGRHCEDAAPNQYVSTPWNIGLAEGIGIVVFVAGIFLLVVVFVLCRKMISRKKKHQAEPKDKHLGPATAFLQRPYFDSKLNKNIYSDIPPQVPVRPISYTPSIPSDSRNNLDRNSFEGSAIPEHPEFSTFNPESVHGHRKAVAVCSVAPNLPPPPPSNSPSDSDSIQKPSWDFDYDTKVVDLDPCLSKKPLEEKPSQPYSARESLSEVQSLSSFQSESCDDNGYHWDTSDWMPSVPLPDIQEFPNYEVIDEQTPLYSADPNAIDTDYYPGGYDIESDFPPPPEDFPAADELPPLPPEFSNQFESIHPPRDMPAAGSLGSSSRNRQRFNLNQYLPNFYPLDMSEPQTKGTGENSTCREPHAPYPPGYQRHFEAPAVESMPMSVYASTASCSDVSACCEVESEVMMSDYESGDDGHFEEVTIPPLDSQQHTEV

SEQ ID NO: 235 - DNA, 6475 bp, homo sapiens
gagagcccccggtggggccggcggaggagcgcccttccccccgcgcgctgattgctgtggcgtcctgcccgtccccgcccgcgtgtgtgcgagggagggcgagtgcgccgggtcggcctgatgggggtaatcgagggtttcggggacgccgagcggcactttcctcttcccagcgagtgaaggagggcagtcggcggctctcgcgccccggccactttccctgcgcgattcccggagctccctgcaggaggtgagagtccccagcgggtccggatggcgtagttttgccgcggcgcagcagctgccggagctcgccgccgccgagcgctgggcggggaaacttgccgccgctttcctccaacttgctgcgggtggatctccgctggacacaccgcctccgaggcagtttgaaaattgcaaggagggactttaagactacttctgatttgcaaagattgtctgtgctctgagcaggctgaagtgactggacgagacgcactgttggagaaataaaaatgacttcccattatgtgattgccatctttgccctgatgagctcctgtttagccactgcaggtccagagcctggtgcactgtgtgaactgtcacctgtcagtgcctcccatcctgtccaggccttgatggagagcttcactgttttgtcaggctgtgccagcagaggcacaactgggctgccacaggaggtgcatgtcctgaatctccgcactgcaggccaggggcctggccagctacagagagaggtcacacttcacctgaatcccatctcctcagtccacatccaccacaagtctgttgtgttcctgctcaactccccacaccccctggtgtggcatctgaagacagagagacttgccactggggtctccagactgtttttggtgtctgagggttctgtggtccagttttcatcagcaaacttctccttgacagcagaaacagaagaaaggaacttcccccatggaaatgaacatctgttaaattgggcccgaaaagagtatggagcagttacttcattcaccgaactcaagatagcaagaaacatttatattaaagtgggggaagatcaagtgttccctccaaagtgcaacatagggaagaattttctctcactcaattaccttgctgagtaccttcaacccaaagcagcagaagggtgtgtgatgtccagccagccccagaatgaggaagtacacatcatcgagctaatcacccccaactctaacccctacagtgctttccaggtggatataacaattgatataagaccttctcaagaggatcttgaagtggtcaaaaatctcatcctgatcttgaagtgcaaaaagtctgtcaactgggtgatcaaatcttttgatgttaagggaagcctgaaaattattgctcctaacagtattggctttggaaaagagagtgaaagatctatgacaatgaccaaatcaataagagatgacattccttcaacccaagggaatctggtgaagtgggctttggacaatggctatagtccaataacttcatacacaatggctcctgtggctaatagatttcatcttcggcttgaaaataatgcagaggagatgggagatgaggaagtccacactattcctcctgagctacggatcctgctggaccctggtgccctgcctgccctgcagaacccgcccatccggggaggggaaggccaaaatggaggccttccgtttcctttcccagatatttccaggagagtctggaatgaagagggagaagatgggctccctcggccaaaggaccctgtcattcccagcatacaactgtttcctggtctcagagagccagaagaggtgcaagggagcgtggatattgccctgtctgtcaaatgtgacaatgagaagatgatcgtggctgtagaaaaagattcttttcaggccagtggctactcggggatggacgtcaccctgttggatcctacctgcaaggccaagatgaatggcacacactttgttttggagtctcctctgaatggctgcggtactcggccccggtggtcagcccttgatggtgtggtctactataactccattgtgatacaggttccagcccttggggacagtagtggttggccagatggttatgaagatctggagtcaggtgataatggatttccgggagatatggatgaaggagatgcttccctgttcacccgacctgaaatcgtggtgtttaattgcagccttcagcaggtgaggaaccccagcagcttccaggaacagccccacggaaacatcaccttcaacatggagctatacaacactgacctctttttggtgccctcccagggcgtcttctctgtgccagagaatggacacgtttatgttgaggtatctgttactaaggctgaacaagaactgggatttgccatccaaacgtgctttatctctccatattcgaaccctgataggatgtctcattacaccattattgagaatatttgtcctaaagatgaatctgtgaaattctacagtcccaagagagtgcactttcctatcccgcaagctgacatggataagaagcgattcagctttgtcttcaagcctgtcttcaacacctcactgctctttctacagtgtgagctgacgctgtgtacgaagatggagaagcacccccagaagttgcctaagtgtgtgcctcctgacgaagcctgcacctcgctggacgcctcgataatctgggccatgatgcagaataagaagacgttcactaagccccttgctgtgatccaccatgaagcagaatctaaagaaaaaggtccaagcatgaaggaaccaaatccaatttctccaccaattttccatggtctggacaccctaaccgtgatgggcattgcgtttgcagcctttgtgatcggagcactcctgacgggggccttgtggtacatctattctcacacaggggagacagcaggaaggcagcaagtccccacctccccgccagcctcggaaaacagcagtgctgcccacagcatcggcagcacgcagagcacgccttgctccagcagcagcacggcctagcccaacccagcccaacccggcccaacccagcccagcccagctcagctcagctactgccaagggcaggaccaatggctgagcctcgtgtccagactcagagggctggattttggttcccttgtaaagacagagtgaatttcagtataaagatcacccgttgtattcaccccacacccagggctagtataaacatgaccctgggcttctgtaccacactagaattcatgtgagaaagctaaaatggtggtcttctccaccagcccctcacaggcttgggggttttcaatgtgaaacacatgccagtttttaaaatgctgctttgtccaggtgagaacatccataatttggggccctgagttttacccagactcaaggagttggtaaagggttaatagccagatagtagaaccagtgaggagatgcggccaaagattctttatatctgaaccaagatgtaaaacaagaaatgctttgaggctttctaagcgatcctcctgtctaatttgcacctttgtctggatgcacacttctgaccttgctgccacaacctgtggggtctgatgtgtcccttgatgggtgctgccctcagggactgcaccctgacaagtgttaaggcaacattcctttcttgtgccctgggccaaaaccaatgctgatgaccttatcagcttcctgtttcttcccatacttgcatacaccactgcaaaatgtcttaatgcaaattttgtatttcttacaggcctacagaaattgaaaatgaccaaaatcaggaaccacagatttgtgcccattcctaatattttgttctgcaaattaatgtataatttgaggtgaaattcagttataaagtcaaggacgaatttgcacagtgatatatttctatgtgtatgcaagtacaagtatataatatgtcacctggcacattcattttctcagttgaagaagagaaaatttgaaaatgtccttatgcttttagagttgcaacttaagtatatttggtagggtgagtgtttccactcaaaatatgtcaacttaaaaaaaaataggccctttcataaaaaccaaactgtagcaagatgcaaatgcatggcaaatcctgtcggtctccagttggttatctgaatagtgtcaccaattccaccaagacagtgctgagattggaaaagggcactcatttggattgccttacttctcttgccttaaatatatcccatatatttaatatgtcaaaaagggcttgaggtgaatttcattaaatggaataatatgatgccactttgcagctaaaataagctcagtgatacctccttgttaaaaaaaaaaaaaaaaaaaaagaatgccaggggggaattatcatgctaaattattttactgctgaagatagcttcattgcaaattattctttttccagaatttcccccaaacaacttagaattccataagtagaacaagatagattctacccccaaaatattcataagcaaatcccactgcccttaaaataaggaagttatgcctggttgtctgtgaatggaacctcagtaggtaatcctgatgaagcttaaaaccttagggcagtgtctacatgggaaacaagtatgtggaaattgacaatcatttttaccaaatcgttgagtaataatatgacttacctgatagatatacacattcaataaggaacatttttttttttcaataaggaacattttaactaaaacattactttagggctgagatttccaggctatctacattgatctactgaaaaatttctagatttccatatacaaacgaagaagacatgagtttagagaatttttttcctttaatttttttttaacagaagggtatcagagtggaggacctagattacgctacctgtgtttgaaaatattgcgctttgcctaaccttcggtggaatgtattgtttcagcatattctatgtataaaaaagtttaaagatgtcttcaaagaagactagagtctttaagtcacttatagctatattttactacaaaatttgtgtataaagatatatttaagtgttttagataaatttaagttactccatatgaaatgtttaatttcagctactgtgaattctttcgatcagtcctttgcttttttaaaaaatcttttccatcgtgttaaaaagaaaattagctattaggagatattaaaagattgatgtcttagaaggacagggttaaaaccttctgtaatatatttaaatatatatttttaagagagatgctacattgccaatgattttataaataatttaaaattaatttacaaatttatagatgcaaaccaaaagatctttttaaaagagagagagaggaaaaaaatcaccttttatttgtttgggtctcattgtcagaattattattcagatcaagaaatctgtgtcgataaaacctaatctcatattggagagtgaatgtcgttaagtatttctgaaatgtttctaaaaaatgaacatgaaaaaaataaggtattttctccctagcttctcattacagtatttctaattgcttcacactttacagttttaatacaaagtacaagctctacttttataacgtgtactacaagtttctttaaaagtattgttgtatttcagctgaactcttgtatctgcagtcttttgttatttctgcaggctacacccttaatttgcagaggccattttgttgtttgtttgatgctgaagctgttgttaaaatgccccaaactccaaggcagattgtctgtataatacgctatagcttttcaccatgtggtgtttaccagctgttactctgtattttaaaaagccagagatttcttctgtctaaactgtttctatagcattttctaaacaaaaaaaatggtttttttctttgccttgtaataagattgtaaatccatttcctgcttgtgttcttagtgggcatgattgtgagtgtgtgtggggtgctcacacgcgtgccagtctttttgtactgtaactacctcatggtttgaatgatgattgtactgctggttgtgttaacagagcacattttgttgggtgagtcctatgtgatttttttcatgtttgttttatctgggggttgttcatgaaactgacagatgtttttctaaaaaggactattatcagtttccaaatacaatacttctctcttctggtttttcctgaatgagcctgattttgttgctggttttcatcatctatgagggtaaaacgagtacccttaaaatccctgtggccagtttgaacacccctgttgtattcttttctctgttcagtgtgtcagctattttgtgaagatgcttagatgtatagttttgataaccacagttttaaatcttttatctgtgcataataaaaagatatatatcagttattaaaaaaaaaa

SEQ ID NO: 236 - protein, 851 aa, homo sapiens
MTSHYVIAIFALMSSCLATAGPEPGALCELSPVSASHPVQALMESFTVLSGCASRGTTGLPQEVHVLNLRTAGQGPGQLQREVTLHLNPISSVHIHHKSVVFLLNSPHPLVWHLKTERLATGVSRLFLVSEGSVVQFSSANFSLTAETEERNFPHGNEHLLNWARKEYGAVTSFTELKIARNIYIKVGEDQVFPPKCNIGKNFLSLNYLAEYLQPKAAEGCVMSSQPQNEEVHIIELITPNSNPYSAFQVDITIDIRPSQEDLEVVKNLILILKCKKSVNWVIKSFDVKGSLKIIAPNSIGFGKESERSMTMTKSIRDDIPSTQGNLVKWALDNGYSPITSYTMAPVANRFHLRLENNAEEMGDEEVHTIPPELRILLDPGALPALQNPPIRGGEGQNGGLPFPFPDISRRVWNEEGEDGLPRPKDPVIPSIQLFPGLREPEEVQGSVDIALSVKCDNEKMIVAVEKDSFQASGYSGMDVTLLDPTCKAKMNGTHFVLESPLNGCGTRPRWSALDGVVYYNSIVIQVPALGDSSGWPDGYEDLESGDNGFPGDMDEGDASLFTRPEIVVFNCSLQQVRNPSSFQEQPHGNITFNMELYNTDLFLVPSQGVFSVPENGHVYVEVSVTKAEQELGFAIQTCFISPYSNPDRMSHYTIIENICPKDESVKFYSPKRVHFPIPQADMDKKRFSFVFKPVFNTSLLFLQCELTLCTKMEKHPQKLPKCVPPDEACTSLDASIIWAMMQNKKTFTKPLAVIHHEAESKEKGPSMKEPNPISPPIFHGLDTLTVMGIAFAAFVIGALLTGALWYIYSHTGETAGRQQVPTSPPASENSSAAHSIGSTQSTPCSSSSTA

SEQ ID NO: 237 - DNA, 6256 bp, homo sapiens
gcggccgccgcctccgccccgcgttcggggccttcccgaccctgcactgctgccgtccgcccgcccggccgctcttctcttcgccgtgggagccgctccgggcgcagggccgcgcgccgagccccgcaggctgcagcgccgcggcccggcccggcgccccggcaacttcgccgagagttgaggcgaagtttgggcgaccgcggcaggccccggccgagctcccctctgcgcccccggcgtcccgtcgagcccagccccgccgggggcgctcctcgccgcccgcgcgccctccccagccatgtcgtccatcctgcctttcactcccccgatcgtgaagcgcctgctgggctggaagaagggcgagcagaacgggcaggaggagaaatggtgcgagaaggcggtcaagagcctggtcaagaaactcaagaagacggggcagctggacgagctggagaaggccatcaccacgcagaacgtcaacaccaagtgcatcaccatccccaggtccctggatggccggttgcaggtgtcccatcggaaggggctccctcatgtcatctactgccgcctgtggcgatggccagacctgcacagccaccacgagctacgggccatggagctgtgtgagttcgccttcaatatgaagaaggacgaggtctgcgtgaatccctaccactaccagagagtagagacaccagttctacctcctgtgttggtgccacgccacacagagatcccggccgagttccccccactggacgactacagccattccatccccgaaaacactaacttccccgcaggcatcgagccccagagcaatattccagagaccccaccccctggctacctgagtgaagatggagaaaccagtgaccaccagatgaaccacagcatggacgcaggttctccaaacctatccccgaatccgatgtccccagcacataataacttggacctgcagccagttacctactgcgagccggccttctggtgctccatctcctactacgagctgaaccagcgcgtcggggagacattccacgcctcgcagccatccatgactgtggatggcttcaccgacccctccaattcggagcgcttctgcctagggctgctctccaatgtcaacaggaatgcagcagtggagctgacacggagacacatcggaagaggcgtgcggctctactacatcggaggggaggtcttcgcagagtgcctcagtgacagcgctatttttgtccagtctcccaactgtaaccagcgctatggctggcacccggccaccgtctgcaagatcccaccaggatgcaacctgaagatcttcaacaaccaggagttcgctgccctcctggcccagtcggtcaaccagggctttgaggctgtctaccagttgacccgaatgtgcaccatccgcatgagcttcgtcaaaggctggggagcggagtacaggagacagactgtgaccagtaccccctgctggattgagctgcacctgaatgggcctttgcagtggcttgacaaggtcctcacccagatgggctccccaagcatccgctgttccagtgtgtcttagagacatcaagtatggtaggggagggcaggcttggggaaaatggccatgcaggaggtggagaaaattggaactctactcaacccattgttgtcaaggaagaagaaatctttctccctcaactgaaggggtgcacccacctgttttctgaaacacacgagcaaacccagaggtggatgttatgaacagctgtgtctgccaaacacatttaccctttggccccactttgaagggcaagaaatggcgtctgctctggtggcttaagtgagcagaacaggtagtattacaccaccggccccctccccccagactctttttttgagtgacagctttctgggatgtcacagtccaaccagaaacacccctctgtctaggactgcagtgtggagttcaccttggaagggcgttctaggtaggaagagcccgcagggccatgcagacctcatgcccagctctctgacgcttgtgacagtgcctcttccagtgaacattcccagcccagccccgccccgccccgccccaccactccagcagaccttgccccttgtgagctggatagacttgggatggggagggagggagttttgtctgtctccctcccctctcagaacatactgattgggaggtgcgtgttcagcagaacctgcacacaggacagcgggaaaaatcgatgagcgccacctctttaaaaactcacttacgtttgtcctttttcactttgaaaagttggaaggatctgctgaggcccagtgcatatgcaatgtatagtgtctattatcacattaatctcaaagagattcgaatgacggtaagtgttctcatgaagcaggaggcccttgtcgtgggatggcatttggtctcaggcagcaccacactgggtgcgtctccagtcatctgtaagagcttgctccagattctgatgcatacggctatattggtttatgtagtcagttgcattcattaaatcaactttatcatatgctcttttaaatgtttggtttatatattttctttaaaaatcctgggctggcacattgactgggaaacctgagtgagacccagcaactgcttctctcccttctctctcctgaggtgaagcttttccaggttttgttgaagagatacctgccagcacttctgcaagctgaaatttacagaagcaaattcaccagaagggaaacatctcaggccaacataggcaaatgaaaagggctattaaaatatttttacacctttgaaaattgcaggcttggtacaaagaggtctgtcatcttccccctgggatataagatgatctagctcccggtagaggatcaccggtgacaactatagcagttgtattgtgtaacaagtactgctcccagcagcaattagggagaaaactagtctaaattatttcaactggaaaaaagaaaaaagagtcctcttcttttcccagccttttgcagaacacagtagacagaactgccaccttcaattggtactttattctttgctgctgtttttgtataaaatgacctatcccacgtttttgcatgaatttatagcaggaaaaatcaagggatttcctatggaagtcctgctttattccaggtgaagggaaggaagtgtatatacttttggcaagtcatacagctcaaatgtgatgagatttctgatgttagagggagatggagaggcttcctgatgcctcatctgcagggtcctgtgcctctgaagttctagccatgaggtttccaggtaggacagctgctccccaagcctcctgaggacacaggaagagacggaaggagcaccttgacagacttgtgtgagtcttctcgaaggagggttgactcagaacccagagacaatacaaaacccctcacttcctctgagagggccaaatgctgtgagtctgaagtatgtgcctggtgtgaaatgatctatggcctgtttcttacacaggaagccccctgaacctcctgtacatgtgttcatgttcccagccagctctgagacccaggaaccaaatattccattttggcttctgctagagcagtcatggttcctctcctaaaagccatgggcagcagtttccgagggcctgcatgatccacctgctgcacgatcctatgagggcttcctgtggcacacagccctctgggtgcttgggaactagcttcaggcacagcctgattctggtgatccagtgatctatggaagtcgtgtcttactccaggtgaagggggaaaaaaaaagcctatactttggcaggttatgaactttgaatgtgatgaaatgacacgtttggctgcatttggatggtgtcttagaaccctcattgctcagacctgaaggctacttctaggagcatgaagtttgagttttgtgtttttccaaaggatacttccttggccctttttctttattgactagaccaccagaggaggatgtgtgggattgtaggcaaacccacctgtggcatcactgaaaataaatttgatcatacctaagaggttaggaaatggtgccattcccaccttagagtgctacataggtgctttgggcgtatgtaacattagtgtccttccttgaagccacaagctagttttcttagttttaaaatcctgttgtatgaatggcatttgtatattaaaacacttttttaaaggacagttgaaaagggcaagaggaaaccagggcagttctagaggagtgctggtgactggatagcagttttaagtggcgttcacctagtcaacacgaccgcgtgtgttgcccctgccctgggctccccgccatgacatcttcaccttgcagcttgtgctgagactgacccaagtgcagctagcactgggacacagatccttgtcttcagcaccttccaaggagccaacttttattccctttcctctctcccctccccacctcgcttcttcccaatttagtaacttagatgcttccagcacatacgtaggtagctaccccagccggtttggattacaggcctgtgctggaacatcatctcagttggccaccttcctggcaggctgtagacctgacattttgagacaagcctagagtcaggagcagggactttgactcttaggaagagcacacatgagggcaaggctgctggcagacgtctccattgtccttatgttgtctgtgttgtatttttttttttttattgaccatggtgattatttttttaaaccatcgttaatatactgaagtgagctatagcacatatcatgtgcttagtttgtttatttttctccatctccccttggcttcctagagtttggacatattccaggctaaatgcttttactcaagactacagaaaggtttgaagtagtgtgtgcatggcatgcacgtatgtaagtaatctggggaagaagcaaagatctgtttcattcttagcctcaggcctcatgagggtctccacagggccggagctcaggttacaccactccttcgtccttacaggagatgtagggagaagaatctgcaggctgcttgtaggactgttcaccaagggggataccagcagcaagagagtgcacccgtttagccctggaccctgtttcttactgtgtgacttggctagagttgggagttcccccaaaataaacgtgtccccattttaccagaaccaaacctcaacacagcgaagctgtactgtctttgtgtggcaaagatgttcccttgtaggcccctttcaggtaaccgtcttcacaatgtattttcatcacagtttaaggagcatcagccgcttctcaagtgggtagggaaagcagaaaaacgtacgcaagaggacatggatccaaaatgatgatgaagcatctcccatggggaggtgatggtggggagatgatgggctaaacaggcaacttttcaaaaacacagctatcatagaaaagaaacttgcctcatgtaaactggattgagaaattctcagtgattctgcaatggatttttttttaatgcagaagtaatgtatactctagtattctggtgtttttatatttatgtaataatttcttaaaaccattcagacagataactatttaattttttttaagaaagttggaaaggtctctcctcccaaggacagtggctggaagagttggggcacagccagttctgaatgttggtggagggtgtagtggctttttggctcagcatccagaaacaccaaaccaggctggctaaacaagtggccgcgtgtaaaaacagacagctctgagtcaaatctgggcccttccacaagggtcctctgaaccaagccccactcccttgctaggggtgaaagcattacagagagatggagccatctatccaagaagccttcactcaccttcactgctgctgttgcaactcggctgttctggactctgatgtgtgtggagggatggggaatagaacattgactgtgttgattaccttcactattcggccagcctgaccttttaataactttgtaaaaagcatgtatgtatttatagtgttttagatttttctaacttttatatcttaaaagcagagcacctgtttaagcattgtacccctattgttaaagatttgtgtcctctcattccctctcttcctcttgtaagtgcccttctaataaacttttcatggaaaagctcctgtgccaggagctcagtctgaaaaaaaaaaaaaaaaaaaaaaaaa

SEQ ID NO: 238 - protein, 425 aa, homo sapiens
MSSILPFTPPIVKRLLGWKKGEQNGQEEKWCEKAVKSLVKKLKKTGQLDELEKAITTQNVNTKCITIPRSLDGRLQVSHRKGLPHVIYCRLWRWPDLHSHHELRAMELCEFAFNMKKDEVCVNPYHYQRVETPVLPPVLVPRHTEIPAEFPPLDDYSHSIPENTNFPAGIEPQSNIPETPPPGYLSEDGETSDHQMNHSMDAGSPNLSPNPMSPAHNNLDLQPVTYCEPAFWCSISYYELNQRVGETFHASQPSMTVDGFTDPSNSERFCLGLLSNVNRNAAVELTRRHIGRGVRLYYIGGEVFAECLSDSAIFVQSPNCNQRYGWHPATVCKIPPGCNLKIFNNQEFAALLAQSVNQGFEAVYQLTRMCTIRMSFVKGWGAEYRRQTVTSTPCWIELHLNGPLQWLDKVLTQMGSPSIRCSSVS

SEQ ID NO: 239 - DNA, 1514 bp, homo sapiens
agttctcactgagacctgtcaccccgactcaacgtgagacgcaccgcccggactcaccatgcgtgaatgcatctcagtccacgtggggcaggcaggtgtccagatgggcaatgcctgctgggagctctattgcttggaacatgggattcagcctgatgggcagatgcccagtgacaagaccattggtggaggggacgactccttcaccaccttcttctgtgaaactggtgctggaaaacacgtaccccgggcagtttttgtggatctggagcctacggtcattgatgagatccgaaatggcccataccgacagctcttccacccagagcagctcatcactgggaaagaggatgctgccaacaactatgcccgtggtcactataccattggcaaggagatcattgacccagtgctggatcggatccgcaagctgtctgaccagtgcacaggacttcagggcttcctggtgttccacagctttggtgggggcactggctctggcttcacctcactcctgatggagcggctctctgttgactatggcaagaaatccaagctggaattctccatctacccagccccccaggtgtctacagccgtggtcgagccctacaactctatcctgaccacccacaccaccctggagcactcagactgtgccttcatggtggacaacgaagcaatctatgacatctgccgccgcaacctagacatcgagcgcccaacctacaccaacctcaatcgcctcattagccaaattgtctcctccatcacagcttctctgcgctttgacggggccctcaatgtggacctgacagagttccagaccaacctggtgccctaccctcgcatccacttccccctggccacctatgcaccagtcatctctgcagaaaaggcataccacgagcagctgtcggtggcagagatcaccaatgcctgctttgagcctgccaaccagatggtaaagtgtgatccccggcacggcaagtacatggcctgctgcctgctgtaccgtggagatgtggtgcccaaggatgtcaacgctgccattgccgccatcaagaccaagcgcagcattcagtttgtggactggtgccccacaggcttcaaggttggtatcaactaccagcctcccactgtggtgcctgggggtgacctggccaaggtgcagcgtgccgtgtgcatgctgagcaacacgaccgccatcgccgaggcctgggcccgcctggaccacaagttcgacctgatgtatgccaagagggcgtttgtgcactggtatgtgggtgagggcatggaggagggtgagttctccgaggcccgtgaggatatggctgccctggagaaggattatgaggaggtgggcatcgactcctatgaggacgaggatgagggagaagaataaagcagctgcctggagcctattcactatgtttattgcaaaatcctttcgaaataaacagtttccttgcacggttaaaaaaaaaaaaaaaaaaaaaaaaaaaaaaaaaaaa

SEQ ID NO: 240 - protein, 448 aa, homo sapiens
MRECISVHVGQAGVQMGNACWELYCLEHGIQPDGQMPSDKTIGGGDDSFTTFFCETGAGKHVPRAVFVDLEPTVIDEIRNGPYRQLFHPEQLITGKEDAANNYARGHYTIGKEIIDPVLDRIRKLSDQCTGLQGFLVFHSFGGGTGSGFTSLLMERLSVDYGKKSKLEFSIYPAPQVSTAVVEPYNSILTTHTTLEHSDCAFMVDNEAIYDICRRNLDIERPTYTNLNRLISQIVSSITASLRFDGALNVDLTEFQTNLVPYPRIHFPLATYAPVISAEKAYHEQLSVAEITNACFEPANQMVKCDPRHGKYMACCLLYRGDVVPKDVNAAIAAIKTKRSIQFVDWCPTGFKVGINYQPPTVVPGGDLAKVQRAVCMLSNTTAIAEAWARLDHKFDLMYAKRAFVHWYVGEGMEEGEFSEAREDMAALEKDYEEVGIDSYEDEDEGEE

SEQ ID NO: 241 - DNA, 3381 bp, homo sapiens
ataagagctgggcccggcccacggcggcggcggcggcggcggagagagctggctcagggcgtccgctaggctcggacgacctgctgagcctcccaaaccgcttccataaggctttgcctttccaacttcagctacagtgttagctaagtttggaaagaaggaaaaaagaaaatccctgggccccttttcttttgttctttgccaaagtcgtcgttgtagtctttttgcccaaggctgttgtgtttttagaggtgctatctccagttccttgcactcctgttaacaagcacctcagcgagagcagcagcagcgatagcagccgcagaagagccagcggggtcgcctagtgtcatgaccagggcgggagatcacaaccgccagagaggatgctgtggatccttggccgactacctgacctctgcaaaattccttctctaccttggtcattctctctctacttggggagatcggatgtggcactttgcggtgtctgtgtttctggtagagctctatggaaacagcctccttttgacagcagtctacgggctggtggtggcagggtctgttctggtcctgggagccatcatcggtgactgggtggacaagaatgctagacttaaagtggcccagacctcgctggtggtacagaatgtttcagtcatcctgtgtggaatcatcctgatgatggttttcttacataaacatgagcttctgaccatgtaccatggatgggttctcacttcctgctatatcctgatcatcactattgcaaatattgcaaatttggccagtactgctactgcaatcacaatccaaagggattggattgttgttgttgcaggagaagacagaagcaaactagcaaatatgaatgccacaatacgaaggattgaccagttaaccaacatcttagcccccatggctgttggccagattatgacatttggctccccagtcatcggctgtggctttatttcgggatggaacttggtatccatgtgcgtggagtacgttctgctctggaaggtttaccagaaaaccccagctctagctgtgaaagctggtcttaaagaagaggaaactgaattgaaacagctgaatttacacaaagatactgagccaaaacccctggagggaactcatctaatgggtgtgaaagactctaacatccatgagcttgaacatgagcaagagcctacttgtgcctcccagatggctgagcccttccgtaccttccgagatggatgggtctcctactacaaccagcctgtgtttctggctggcatgggtcttgctttcctttatatgactgtcctgggctttgactgcatcaccacagggtacgcctacactcagggactgagtggttccatcctcagtattttgatgggagcatcagctataactggaataatgggaactgtagcttttacttggctacgtcgaaaatgtggtttggttcggacaggtctgatctcaggattggcacagctttcctgtttgatcttgtgtgtgatctctgtattcatgcctggaagccccctggacttgtccgtttctccttttgaagatatccgatcaaggttcattcaaggagagtcaattacacctaccaagatacctgaaattacaactgaaatatacatgtctaatgggtctaattctgctaatattgtcccggagacaagtcctgaatctgtgcccataatctctgtcagtctgctgtttgcaggcgtcattgctgctagaatcggtctttggtcctttgatttaactgtgacacagttgctgcaagaaaatgtaattgaatctgaaagaggcattataaatggtgtacagaactccatgaactatcttcttgatcttctgcatttcatcatggtcatcctggctccaaatcctgaagcttttggcttgctcgtattgatttcagtctcctttgtggcaatgggccacattatgtatttccgatttgcccaaaatactctgggaaacaagctctttgcttgcggtcctgatgcaaaagaagttaggaaggaaaatcaagcaaatacatctgttgtttgagacagtttaactgttgctatcctgttactagattatatagagcacatgtgcttattttgtactgcagaattccaataaatggctgggtgttttgctctgtttttaccacagctgtgccttgagaactaaaagctgtttaggaaacctaagtcagcagaaattaactgattaatttcccttatgttgaggcatggaaaaaaaattggaaaagaaaaactcagtttaaatacggagactataatgataacactgaattcccctatttctcatgagtagatacaatcttacgtaaaagagtggttagtcacgtgaattcagttatcatttgacagattcttatctgtactagaattcagatatgtcagttttctgcaaaactcactcttgttcaagactagctaatttatttttttgcatcttagttatttttaaaaacaaattcttcaagtatgaagactaaattttgataactaatattatccttattgatcctattgatcttaaggtatttacatgtatgtggaaaaacaaaacacttaactagaattctctaataaggtttatggtttagcttaaagagcacctttgtatttttattatcagatggggcaacatattgtatgaagcatatgtagcacttcacagcatggttatcatgtaagctgcaggtagaagcaaagctgtaaagtagatttatcacacaatgactgcatacagacttcaaatatgtcaatagtttggtcatagaacctagaagccaaaagccacacagaagggcaagaatcccaatttaactcatgttatcatcattagtgatctgtgttgtagaacatgagggtgtaagccttcagcctggcaagttacatgtagaaagcccacacttgtgaaggttttgttttacaaatcacttgatttaacacactcaggtagaatatttttatttttactgttttatacccagaagttatttctacattgttctacagcaagaatattcataaaagtatccctttcaaatgcctttgagaagaatagaagaaaaaaagtttgtatatattttaaaaaattgttttaaaagtcagtttgcaacatgtctgtaccaagatggtactttgccttaaccgtttatatgcactttcatggagactgcaatacgttgctatgagcactttctttatccttggagtttaatcctttgcttcatctttctacagtatgacataatgatttgctatgttgtaaaatctttgtaaaaaatttctatataaaaatattttgaaaatcttaaaaaaaaaaaaaaaaaaaaaaaaaaaa

SEQ ID NO: 242 - protein, 571 aa, homo sapiens
MTRAGDHNRQRGCCGSLADYLTSAKFLLYLGHSLSTWGDRMWHFAVSVFLVELYGNSLLLTAVYGLVVAGSVLVLGAIIGDWVDKNARLKVAQTSLVVQNVSVILCGIILMMVFLHKHELLTMYHGWVLTSCYILIITIANIANLASTATAITIQRDWIVVVAGEDRSKLANMNATIRRIDQLTNILAPMAVGQIMTFGSPVIGCGFISGWNLVSMCVEYVLLWKVYQKTPALAVKAGLKEEETELKQLNLHKDTEPKPLEGTHLMGVKDSNIHELEHEQEPTCASQMAEPFRTFRDGWVSYYNQPVFLAGMGLAFLYMTVLGFDCITTGYAYTQGLSGSILSILMGASAITGIMGTVAFTWLRRKCGLVRTGLISGLAQLSCLILCVISVFMPGSPLDLSVSPFEDIRSRFIQGESITPTKIPEITTEIYMSNGSNSANIVPETSPESVPIISVSLLFAGVIAARIGLWSFDLTVTQLLQENVIESERGIINGVQNSMNYLLDLLHFIMVILAPNPEAFGLLVLISVSFVAMGHIMYFRFAQNTLGNKLFACGPDAKEVRKENQANTSVV

SEQ ID NO: 243 - DNA, 3620 bp, homo sapiens
agcgccggcgaggcgcgggaggaggagaagcagtggggaggcgcagccgctcacctgcggggcagggcgcggaggagggacccgggctgcgcgctctcgggccgaggaaccaggacgcgcccggagcctcgcacgcggccaagctcggggcgtcccctcccctcggccgggcgaactcaaggggcgcagctctttgctttgacagagctggccggcggaggcgtgcagagcggcgagccggcgagccaggctgagaaactcgagccgggaacaaagaggggtcggactgagtgtgtgtgtcggctcgagctccgggcagaggcatttgggcccgaggcccccgctgtgactccccgagactccgcagtgccctccactgcggagtccccgcgcttgccggcaaaaactttattcttggcaaacttctctttctcttcccctcctcctcggcccccatcttctgctcctcctccttctctagcagattaaatgagcctcgagaagaaaaaccgaagcgaaagggaagaaaataagaagatctaaaacggacatctccagcgtgggtggctcctttttctttttctttttttcccacccttcaggaagtggacgtttcgttatcttctgatccttgcaccttcttttggggcaaacggggcccttctgcccagatcccctctcttttctcggaaaacaaactactaagtcggcatccggggtaactacagtggagagggtttccgcggagacgcgccgccggaccctcctctgcactttggggaggcgtgctccctccagaaccggcgttctccgcgcgcaaatcccggcgacgcggggtcgcggggtggccgccggggcagcctcgtctagcgcgcgccgcgcagacgcccccggagtcgccagctaccgcagccctcgccgcccagtgcccttcggcctcgggggcgggcgcctgcgtcggtctccgcgaagcgggaaagcgcggcggccgccgggattcgggcgccgcggcagctgctccggctgccggccggcggccccgcgctcgcccgccccgcttccgcccgctgtcctgctgcacgaacccttccaactctcctttcctcccccacccttgagttacccctctgtctttcctgctgttgcgcgggtgctcccacagcggagcggagattacagagccgccgggatgccccaactctccggaggaggtggcggcggcgggggggacccggaactctgcgccacggacgagatgatccccttcaaggacgagggcgatcctcagaaggaaaagatcttcgccgagatcagtcatcccgaagaggaaggcgatttagctgacatcaagtcttccttggtgaacgagtctgaaatcatcccggccagcaacggacacgaggtggccagacaagcacaaacctctcaggagccctaccacgacaaggccagagaacaccccgatgacggaaagcatccagatggaggcctctacaacaagggaccctcctactcgagttattccgggtacataatgatgccaaatatgaataacgacccatacatgtcaaatggatctctttctccacccatcccgagaacatcaaataaagtgcccgtggtgcagccatcccatgcggtccatcctctcacccccctcatcacttacagtgacgagcacttttctccaggatcacacccgtcacacatcccatcagatgtcaactccaaacaaggcatgtccagacatcctccagctcctgatatccctactttttatcccttgtctccgggtggtgttggacagatcaccccacctcttggctggcaaggtcagcctgtatatcccatcacgggtggattcaggcaaccctacccatcctcactgtcagtcgacacttccatgtccaggttttcccatcatatgattcccggtcctcctggtccccacacaactggcatccctcatccagctattgtaacacctcaggtcaaacaggaacatccccacactgacagtgacctaatgcacgtgaagcctcagcatgaacagagaaaggagcaggagccaaaaagacctcacattaagaagcctctgaatgcttttatgttatacatgaaagaaatgagagcgaatgtcgttgctgagtgtactctaaaagaaagtgcagctatcaaccagattcttggcagaaggtggcatgccctctcccgtgaagagcaggctaaatattatgaattagcacggaaagaaagacagctacatatgcagctttatccaggctggtctgcaagagacaattatggtaagaaaaagaagaggaagagagagaaactacaggaatctgcatcaggtacaggtccaagaatgacagctgcctacatctgaaacatggtggaaaacgaagctcattcccaacgtgcaaagccaaggcagcgaccccaggacctcttctggagatggaagcttgttgaaaacccagactgtctccacggcctgcccagtcgaccccaaaggaacactgacatcaattttaccctgaggtcactgctagagacgctgatccataaagacaatcactgccaacccctctttcgtctactgcaagagccaagttccaaaataaagcataaaaaggttttttaaaaggaaatgtaaaagcacatgagaatgctagcaggctgtggggcagctgagcagcttttctcccctcatatctgcgtgcacttcccagagcatcttgcatccaaacctgtaacctttcggcaaggacggtaacttggctgcatttgcctgtcatgcgcaactggagccagcaaccagcacatccatcagcaccccagtggaggagttcatggaagagttccctctttgtttctgcttcatttttctttcttttcttttctcctaaagcttttatttaacagtgcaaaaggatcgtttttttttgcttttttaaacttgaatttttttaatttacactttttagttttaattttcttgtatattttgctagctatgagcttttaaataaaattgaaagttctggaaaagtttgaaataatgacataaaaagaagccttctttttctgagacagcttgtctggtaagtggcttctctgtgaattgcctgtaacacatagtggcttctccgcccttgtaaggtgttcagtagagctaaataaatgtaatagccaaacccactctgttggtagcaattggcagccctatttcagtttattttttcttctgttttcttcttttctttttttaaacagtaaaccttaacagatgcgttcagcagactggtttgcagtgaattttcatttctttccttatcacccccttgttgtaaaaagcccagcacttgaattgttattactttaaatgttctgtatttgtatctgtttttattagccaattagtgggattttatgccagttgttaaaatgagcattgatgtacccattttttaaaaaagcaaggcacagcctttgcccaaaactgtcatcctaacgtttgtcattccagtttgagttaatgtgctgagcatttttttaaaagaagctttgtaataaaacatttttaaaaattgtcatttaaaaaaaaaaaaaaaaaa

SEQ ID NO: 244 - protein, 399 aa, homo sapiens
MPQLSGGGGGGGGDPELCATDEMIPFKDEGDPQKEKIFAEISHPEEEGDLADIKSSLVNESEIIPASNGHEVARQAQTSQEPYHDKAREHPDDGKHPDGGLYNKGPSYSSYSGYIMMPNMNNDPYMSNGSLSPPIPRTSNKVPVVQPSHAVHPLTPLITYSDEHFSPGSHPSHIPSDVNSKQGMSRHPPAPDIPTFYPLSPGGVGQITPPLGWQGQPVYPITGGFRQPYPSSLSVDTSMSRFSHHMIPGPPGPHTTGIPHPAIVTPQVKQEHPHTDSDLMHVKPQHEQRKEQEPKRPHIKKPLNAFMLYMKEMRANVVAECTLKESAAINQILGRRWHALSREEQAKYYELARKERQLHMQLYPGWSARDNYGKKKKRKREKLQESASGTGPRMTAAYI

SEQ ID NO: 245 - DNA, 1351 bp, homo sapiens
gtgatggagagcaccagcaaagccttagggcccatccctggcctcctgttacccacagaggggtaggcccttggctctcttccactatgacgtcagcttccattcttcctttcttatagacaattttccatttcaaggaaatcagagcccttaatagttcagtgaggtcactttgctgagcacaatcccatacccttcagcctctgctccacagagcctaagcaaaagatagaaactcacaacttccttgttttgttatctggaaattatcccaggatctggtgcttactcagcatattcaaggaaggtcttacttcattcttccttgattgtgaccatgcccaggctctctgctccctataaaaggcaggcagagccaccgaggagcagagaggttgagaacaacccagaaaccttcacctctcatgctgaagctcacacccttgccctccaagatgaaggtttctgcagcgcttctgtgcctgctgctcatggcagccactttcagccctcagggacttgctcagccagattcagtttccattccaatcacctgctgctttaacgtgatcaataggaaaattcctatccagaggctggagagctacacaagaatcaccaacatccaatgtcccaaggaagctgtgatcttcaagaccaaacggggcaaggaggtctgtgctgaccccaaggagagatgggtcagggattccatgaagcatctggaccaaatatttcaaaatctgaagccatgagccttcatacatggactgagagtcagagcttgaagaaaagcttatttattttccccaacctcccccaggtgcagtgtgacattattttattataacatccacaaagagattatttttaaataatttaaagcataatatttcttaaaaagtatttaattatatttaagttgttgatgttttaactctatctgtcatacatcctagtgaatgtaaaatgcaaaatcctggtgatgtgttttttgtttttgttttcctgtgagctcaactaagttcacggcaaaatgtcattgttctccctcctacctgtctgtagtgttgtggggtcctcccatggatcatcaaggtgaaacactttggtattctttggcaatcagtgctcctgtaagtcaaatgtgtgctttgtactgctgttgttgaaattgatgttactgtatataactatggaattttgaaaaaaaatttcaaaaagaaaaaaatatatataatttaaaactaaaaaaaaaaaaaaaaaaaaaaaaaaaaaaaaaaaaaaaaaaaaaaaaaaaaaaaaaaaaaaaaaaaaaaaaaaaaaaaaaaaaaaaaaaaaaaaaaaaaaa

SEQ ID NO: 246 - protein, 99 aa, homo sapiens
MKVSAALLCLLLMAATFSPQGLAQPDSVSIPITCCFNVINRKIPIQRLESYTRITNIQCPKEAVIFKTKRGKEVCADPKERWVRDSMKHLDQIFQNLKP

SEQ ID NO: 247 - DNA, 1657 bp, homo sapiens
gctcacaggaagccacgcacccttgaaaggcaccgggtccttcttagcatcgtgcttcctgagcaagcctggcattgcctcacagaccttcctcagagccgctttcagaaaagcaagctgcttctggttgggcccagacctgccttgaggagcctgtagagttaaaaaatgaaccccacggatatagcagacaccaccctcgatgaaagcatatacagcaattactatctgtatgaaagtatccccaagccttgcaccaaagaaggcatcaaggcatttggggagctcttcctgcccccactgtattccttggtttttgtatttggtctgcttggaaattctgtggtggttctggtcctgttcaaatacaagcggctcaggtccatgactgatgtgtacctgctcaaccttgccatctcggatctgctcttcgtgttttccctccctttttggggctactatgcagcagaccagtgggtttttgggctaggtctgtgcaagatgatttcctggatgtacttggtgggcttttacagtggcatattctttgtcatgctcatgagcattgatagatacctggcaattgtgcacgcggtgttttccttgagggcaaggaccttgacttatggggtcatcaccagtttggctacatggtcagtggctgtgttcgcctcccttcctggctttctgttcagcacttgttatactgagcgcaaccatacctactgcaaaaccaagtactctctcaactccacgacgtggaaggttctcagctccctggaaatcaacattctcggattggtgatccccttagggatcatgctgttttgctactccatgatcatcaggaccttgcagcattgtaaaaatgagaagaagaacaaggcggtgaagatgatctttgccgtggtggtcctcttccttgggttctggacaccttacaacatagtgctcttcctagagaccctggtggagctagaagtccttcaggactgcacctttgaaagatacttggactatgccatccaggccacagaaactctggcttttgttcactgctgccttaatcccatcatctacttttttctgggggagaaatttcgcaagtacatcctacagctcttcaaaacctgcaggggcctttttgtgctctgccaatactgtgggctcctccaaatttactctgctgacacccccagctcatcttacacgcagtccaccatggatcatgatctccatgatgctctgtagaaaaatgaaatggtgaaatgcagagtcaatgaactttccacattcagagcttacttaaaattgtattttagtaagagattcctgagccagtgtcaggaggaaggcttacacccacagtggaaagacagcttctcatcctgcaggcagctttttctctcccactagacaagtccagcctggcaagggttcacctgggctgaggcatccttcctcacaccaggcttgcctgcaggcatgagtcagtctgatgagaactctgagcagtgcttgaatgaagttgtaggtaatattgcaaggcaaagactattcccttctaacctgaactgatgggtttctccagagggaattgcagagtactggctgatggagtaaatcgctaccttttgctgtggcaaatgggccctct

SEQ ID NO: 248 - protein, 360 aa, homo sapiens
MNPTDIADTTLDESIYSNYYLYESIPKPCTKEGIKAFGELFLPPLYSLVFVFGLLGNSVVVLVLFKYKRLRSMTDVYLLNLAISDLLFVFSLPFWGYYAADQWVFGLGLCKMISWMYLVGFYSGIFFVMLMSIDRYLAIVHAVFSLRARTLTYGVITSLATWSVAVFASLPGFLFSTCYTERNHTYCKTKYSLNSTTWKVLSSLEINILGLVIPLGIMLFCYSMIIRTLQHCKNEKKNKAVKMIFAVVVLFLGFWTPYNIVLFLETLVELEVLQDCTFERYLDYAIQATETLAFVHCCLNPIIYFFLGEKFRKYILQLFKTCRGLFVLCQYCGLLQIYSADTPSSSYTQSTMDHDLHDAL

SEQ ID NO: 249 - DNA, 4287 bp, homo sapiens
agagtaactgctgaaaggaggtggcgaaggaggatccggagcagctgctgccagcccgcgggcactgaagtcctcccggctgccgctcgagtagccacgggcgcgatcgggaccagaagtctcctcctccatgatcactttggaagccgggggaagactttgccctgccctgagagctggtctgcgtttcccaggcgcggcggcggcggagcagcagctgcagcagccgagtccaaataggagcggccacagccaggggcgtgagcgccccgcgcggagcgagctcgggttcccctcggaatgtccccggggcgcccggcgcgctgaccccgaagccgcctccgccttcggcgcctgctgcctccctcggccaggcttgttgttcgggactgtgagcttcctggctcctgggcagtggggaagcccccgggggcgagtgacctcagctggccacgacccagccctcccccgtgcgtatctcgcttaagatggcagcggagtcaggggaactaatcggggcttgtgagttcatgaaagatcggttatattttgctactttaaggaatagaccaaaaagcacagtaaatacccactatttctccatcgatgaggagctggtctatgaaaatttctatgcagattttggaccgctgaacttggcaatggtgtacagatattgctgcaaactaaacaagaaactaaaatcatacagtttgtcaagaaagaaaatagtgcactacacctgttttgaccaacggaaaagagcaaatgcagcatttttgataggtgcctatgcagtaatctatttaaagaagacaccagaagaagcctacagagcactcctgtctggctcaaaccccccctatcttccattcagggatgcttcctttggaaattgcacttacaatctcaccattctcgactgtttgcagggaatcagaaagggattacaacatggattttttgactttgagacatttgatgtggatgaatatgaacattatgagcgagttgaaaatggtgacttcaactggattgttccaggaaaatttttagcatttagtggaccacatcctaaaagcaaaattgagaatggttatcctcttcacgcccctgaagcctactttccttatttcaaaaagcataatgtgactgcagttgtgaggctaaacaaaaagatttatgaggcaaagcgcttcacagacgctggcttcgagcactatgacctcttcttcatagatggcagcacacccagtgacaacatcgtgcgaaggttcctgaacatctgtgagaacaccgaaggggccatcgccgttcactgcaaagctggtcttggaagaacagggacattgatagcctgttatgtaatgaaacactacaggtttacacatgctgaaataattgcttggattagaatatgccggccaggctctattataggaccccagcagcacttcctggaagaaaaacaagcatcgttgtgggtccaaggagacattttccgatccaaactgaaaaatcgaccatccagtgaaggaagtattaataaaattctttctggcctagatgatatgtctattggtggaaatctttcaaaaacacaaaacatggaacgatttggagaggataacttagaagatgatgatgtggaaatgaaaaatggtataacccagggagacaaactacgtgccttaaaaagtcagagacagccacgtacctcaccatcctgtgcatttaggtcagatgatacaaaaggacatccaagagcagtgtcccagcctttcagattaagttcatccctgcaaggatctgcagttactttgaagacatcaaaaatggcactgtccccttcagcaacggccaagaggatcaacagaacttctttgtcttcgggtgccactgtaagaagcttttccataaactcccggctagccagttctctagggaacttgaatgctgcaacagatgatccagagaacaaaaagacctcctcatcctctaaggcaggcttcacagccagcccgtttaccaacctcttgaatggcagctcccagccaactaccagaaattaccctgagctcaacaataatcagtacaacagaagcagcaacagcaacgggggcaacctgaacagccccccaggcccccacagcgccaagacagaggagcacaccaccatcctccgaccctcctacaccgggctttcttcttcttcagcgagattcctgagccgttctatcccttcccttcagtctgaatatgttcattactaaggccttgccactccagtgaaagctgttcttctcttagacacaatttcttcatctggacgagcagtggagagggaaagcaacttcttgctggaagaatatctctgccttcttaccttaaattaaaaagagcactaagataacaccttcaagagacttgaaaacagaaaactggttaatgactactataaatgcactgaaactatgtttatggagatttccatacttttaaagacagttttaatgttgaatttggtattttgaagggttatttttaatgtattttggtaatacatttattattatatttacatgtacagtgttacattatatatgtattgtgaactttaaaagactattttgataaatttataaatatataaaattatgtaaaaactacactatattttgatttagattttcctgctgtttgctaccaaaaatttgtattttaaatctgtttagttttagtatggttttgtctctaatgaataaataattccttcttattaagaagaagtaagggagaaagtttttagaaagtgatttttatgctcgcactataaatatggcaggtcagttcattcttttgggaagtcagtttagttacactgagtttatccaagtttatctctaccaagagtataatggcatgggatggcttatttaggacaattccctttcctattgtttttgttgctgagccaatttgagttagttttgcatcctggggggctttaaaatacagcatgcagtgaaagatcagaattcactgaatatttcttctgagagcatggtttcatggtttttctctatgaaatgactcaatattccaaatgtttttttttccttcctcctttcaaaagagttcttaacccaattaggatatcctgctttgggtatgaggttgttgttgcctgtaatcacacatggtttgacatcagttttaaatcaatggagagaaaaaactgaaaaagatgctgctaagtagttctctgtattaaaggagatatttttaaaacagggtacaaccccctgctgcacacgctagcatatctggaacctactatgaaaatgaaaggacccttataggtactcacagccctttcatgtaagtatgatctgatatttaggtcttcagaagcctgtaggtttcatttctatgaggaatcgaggagcgttacatcctgatatccttccaggctgcttaagaatggactgcttcgacactgaaagtgctagttaaatggattcatatgaagtgctttactcccaaccattgagttatttataatgtatttattaggggagggtaccttgagtctattatatatgcttcatcaaaacatcttgttcatgttttatgtttttaaaaaaggcatttgaatgaatgtttgactcaggtttgttaaattaaccttcagtaactgcagtaccaaaaattacactcaactgatgaaaaaaacgaattgtatgatttaggaatcaaaaactaaaataagtggaattatgtatcttttctaaagttaaaaaagtaaaatattttattatgagttattataaaaattggttaattgtataggaagatgacagtatttttttcaagttatcataaaaagtaattcagatgacatttgagaagtaggggaaagggaatcatgttgacagttttagttctgtgaacactaatttgtgtgaagctattaaaatgattgtaaagttgactactgtaaatttcccataattatgtgtgtatatgtgtcatatgtatgtacatgtatatgtctaaaaattactttacacatgtgcctacatagacacaccaagaagtggatgtatataatatagaaagtatatagcaaagtaattttactctgataataaaaattgtttgacatgtattttgttatgaatagtttatcttccaaaagatattttgctctattttaaagtgtagaagaatacactgctaataaataataaaagttttattcaatttaaaaaaaaaaaaaaaaaa

SEQ ID NO: 250 - protein, 594 aa, homo sapiens
MAAESGELIGACEFMKDRLYFATLRNRPKSTVNTHYFSIDEELVYENFYADFGPLNLAMVYRYCCKLNKKLKSYSLSRKKIVHYTCFDQRKRANAAFLIGAYAVIYLKKTPEEAYRALLSGSNPPYLPFRDASFGNCTYNLTILDCLQGIRKGLQHGFFDFETFDVDEYEHYERVENGDFNWIVPGKFLAFSGPHPKSKIENGYPLHAPEAYFPYFKKHNVTAVVRLNKKIYEAKRFTDAGFEHYDLFFIDGSTPSDNIVRRFLNICENTEGAIAVHCKAGLGRTGTLIACYVMKHYRFTHAEIIAWIRICRPGSIIGPQQHFLEEKQASLWVQGDIFRSKLKNRPSSEGSINKILSGLDDMSIGGNLSKTQNMERFGEDNLEDDDVEMKNGITQGDKLRALKSQRQPRTSPSCAFRSDDTKGHPRAVSQPFRLSSSLQGSAVTLKTSKMALSPSATAKRINRTSLSSGATVRSFSINSRLASSLGNLNAATDDPENKKTSSSSKAGFTASPFTNLLNGSSQPTTRNYPELNNNQYNRSSNSNGGNLNSPPGPHSAKTEEHTTILRPSYTGLSSSSARFLSRSIPSLQSEYVHY

SEQ ID NO: 251 - DNA, 3286 bp, Homo Sapiens
ccgccagtccccgcgcagtccccgcgcagtccccgcgcagtcccagcgccaccgggcagcagcggcgccgtgctcgctccagggcgcaaccatgtcgccatttcttcggattggcttgtccaactttgactgcgggtcctgccagtcttgtcagggcgaggctgttaacccttactgtgctgtgctcgtcaaagagtatgtcgaatcagagaacgggcagatgtatatccagaaaaagcctaccatgtacccaccctgggacagcacttttgatgcccatatcaacaagggaagagtcatgcagatcattgtgaaaggcaaaaacgtggacctcatctctgaaaccaccgtggagctctactcgctggctgagaggtgcaggaagaacaacgggaagacagaaatatggttagagctgaaacctcaaggccgaatgctaatgaatgcaagatactttctggaaatgagtgacacaaaggacatgaatgaatttgagacggaaggcttctttgctttgcatcagcgccggggtgccatcaagcaggcaaaggtccaccacgtcaagtgccacgagttcactgccaccttcttcccacagcccacattttgctctgtctgccacgagtttgtctggggcctgaacaaacagggctaccagtgccgacaatgcaatgcagcaattcacaagaagtgtattgataaagttatagcaaagtgcacaggatcagctatcaatagccgagaaaccatgttccacaaggagagattcaaaattgacatgccacacagatttaaagtctacaattacaagagcccgaccttctgtgaacactgtgggaccctgctgtggggactggcacggcaaggactcaagtgtgatgcatgtggcatgaatgtgcatcatagatgccagacaaaggtggccaacctttgtggcataaaccagaagctaatggctgaagcgctggccatgattgagagcactcaacaggctcgctgcttaagagatactgaacagatcttcagagaaggtccggttgaaattggtctcccatgctccatcaaaaatgaagcaaggccgccatgtttaccgacaccgggaaaaagagagcctcagggcatttcctgggagtctccgttggatgaggtggataaaatgtgccatcttccagaacctgaactgaacaaagaaagaccatctctgcagattaaactaaaaattgaggattttatcttgcacaaaatgttggggaaaggaagttttggcaaggtcttcctggcagaattcaagaaaaccaatcaatttttcgcaataaaggccttaaagaaagatgtggtcttgatggacgatgatgttgagtgcacgatggtagagaagagagttctttccttggcctgggagcatccgtttctgacgcacatgttttgtacattccagaccaaggaaaacctcttttttgtgatggagtacctcaacggaggggacttaatgtaccacatccaaagctgccacaagttcgacctttccagagcgacgttttatgctgctgaaatcattcttggtctgcagttccttcattccaaaggaatagtctacagggacctgaagctagataacatcctgttagacaaagatggacatatcaagatcgcggattttggaatgtgcaaggagaacatgttaggagatgccaagacgaataccttctgtgggacacctgactacatcgccccagagatcttgctgggtcagaaatacaaccactctgtggactggtggtccttcggggttctcctttatgaaatgctgattggtcagtcgcctttccacgggcaggatgaggaggagctcttccactccatccgcatggacaatcccttttacccacggtggctggagaaggaagcaaaggaccttctggtgaagctcttcgtgcgagaacctgagaagaggctgggcgtgaggggagacatccgccagcaccctttgtttcgggagatcaactgggaggaacttgaacggaaggagattgacccaccgttccggccgaaagtgaaatcaccatttgactgcagcaatttcgacaaagaattcttaaacgagaagccccggctgtcatttgccgacagagcactgatcaacagcatggaccagaatatgttcaggaacttttccttcatgaaccccgggatggagcggctgatatcctgaatcttgcccctccagagacaggaaagaatttgccttctccctgggaactggttcaagagacactgcttgggttcctttttcaacttggaaaaagaaagaaacactcaacaataaagactgagacccgttcgcccccatgtgacttttatctgtagcagaaaccaagtctacttcactaatgacgatgccgtgtgtctcgtctcctgacatgtctcacagacgctcctgaagttaggtcattactaaccatagttatttacttgaaagatgggtctccgcacttggaaaggtttcaagacttgatactgcaataaattatggctcttcacctgggcgccaactgctgatcaatgaaatgcttgttgaatcaggggcaaacggagtacagacgtctcaagactgaaacggccccattgcctggtctagtagcggatctcactcagccgcagacaagtaatcactaacccgttttattctattcctatctgtggatgtgtaaatggctggggggccagccctggataggtttttatgggaattctttacaataaacatagcttgtaacttgagatctacaaatccattcatcctgattgggcatgaaatccatggtcaagaggacaagtggaaagtgagagggaaggtttgctagacaccttcgcttgttatcttgtcaagatagaaaagatagtatcatttcacccttgccagtaaaaacctttccatccacccattctcagcagactccagtattggcacagtcactcactgccattctcacactataacaagaaaagaaatgaagtgcataagtctcctgggaaaagaaccttaaccccttctcgtgccatgactggtgatttcatgactcataagcccctccgtaggcatcattcaagatcaatggcccatgcatgctgtttgcagcagtcaattgagttgaattagaattccaaccatacattttaaaggtatttgtgctgtgtgtatattttgataaaatgttgtgacttcatggcaaacaggtggatgtgtaaaaatggaataaaaaaaaaaaaagagtcaaaaaaaaaa

SEQ ID NO: 252 - protein, 706 aa, Homo Sapiens
MSPFLRIGLSNFDCGSCQSCQGEAVNPYCAVLVKEYVESENGQMYIQKKPTMYPPWDSTFDAHINKGRVMQIIVKGKNVDLISETTVELYSLAERCRKNNGKTEIWLELKPQGRMLMNARYFLEMSDTKDMNEFETEGFFALHQRRGAIKQAKVHHVKCHEFTATFFPQPTFCSVCHEFVWGLNKQGYQCRQCNAAIHKKCIDKVIAKCTGSAINSRETMFHKERFKIDMPHRFKVYNYKSPTFCEHCGTLLWGLARQGLKCDACGMNVHHRCQTKVANLCGINQKLMAEALAMIESTQQARCLRDTEQIFREGPVEIGLPCSIKNEARPPCLPTPGKREPQGISWESPLDEVDKMCHLPEPELNKERPSLQIKLKIEDFILHKMLGKGSFGKVFLAEFKKTNQFFAIKALKKDVVLMDDDVECTMVEKRVLSLAWEHPFLTHMFCTFQTKENLFFVMEYLNGGDLMYHIQSCHKFDLSRATFYAAEIILGLQFLHSKGIVYRDLKLDNILLDKDGHIKIADFGMCKENMLGDAKTNTFCGTPDYIAPEILLGQKYNHSVDWWSFGVLLYEMLIGQSPFHGQDEEELFHSIRMDNPFYPRWLEKEAKDLLVKLFVREPEKRLGVRGDIRQHPLFREINWEELERKEIDPPFRPKVKSPFDCSNFDKEFLNEKPRLSFADRALINSMDQNMFRNFSFMNPGMERLIS

SEQ ID NO: 253 - DNA, 3288 bp, Homo Sapiens
gctccctcccctcctagctggcttcggcggggacggcggcggcggcggcgggcggggagggcgtgcgccggccgagaggtgtcggcggcgaggcaaaggaagtttcaagtggaaggtcgtccgtcggccggcgcgtcctcctgctctcctccgcagcatcatggcggagccgagcggctcgcccgtgcacgtccagcttccccagcaggcggccccggtgacagcggcggcggcggcggccccggcggccgcgacagcagcgccggccccggcagctcccgcggccccggccccggccccggccccggcggcacaggctgtcggctggcccatctgcagggacgcgtacgagctgcaggaggttatcggcagtggagctactgctgtggttcaggcagccctatgcaaacccaggcaagaacgtgtagcaataaaacggatcaacttggaaaaatgccagaccagtatggatgaactattaaaagaaattcaagccatgagtcagtgcagccatcccaacgtagtgacctattacacctcttttgtggtcaaagatgaactttggctggtcatgaaattactaagtggaggttcaatgttggatatcataaaatacattgtcaaccgaggagaacacaagaatggagttctggaagaggcaataatagcaacaattcttaaagaggttttggaaggcttagactatctacacagaaacggtcagattcacagggatttgaaagctggtaatattcttctgggtgaggatggttcagtacaaatagcagattttggggtaagtgcgttcctagcaacagggggtgatgttacccgaaataaagtaagaaaaacattcgttggcaccccatgttggatggctcctgaagtcatggaacaggtgagaggctatgacttcaaggctgacatgtggagttttggaataactgccattgaattagcaacaggagcagcgccttatcacaaatatcctcccatgaaagtgttaatgttgactttgcaaaatgatccacccactttggaaacaggggtagaggataaagaaatgatgaaaaagtacggcaagtcctttagaaaattactttcactgtgtcttcagaaagatccttccaaaaggcccacagcagcagaacttttaaaatgcaaattcttccagaaagccaagaacagagagtacctgattgagaagctgcttacaagaacaccagacatagcccaaagagccaaaaaggtaagaagagttcctgggtcaagtggtcaccttcataaaaccgaagacggggactgggagtggagtgacgacgagatggatgagaagagcgaagaagggaaagcagctttttctcaggaaaagtcacgaagagtaaaagaagaaaatccagagattgcagtgagtgccagcaccatccccgaacaaatacagtccctctctgtgcacgactctcagggcccacccaatgctaatgaagactacagagaagcttcttcttgtgccgtgaacctcgttttgagattaagaaactccagaaaggaacttaatgacatacgatttgagtttactccaggaagagatacagcagatggtgtatctcaggagctcttctctgctggcttggtggatggtcacgatgtagttatagtggctgctaatttacagaagattgtagatgatcccaaagctttaaaaacattgacatttaagttggcttctggctgtgatgggtcggagattcctgatgaagtgaagctgattgggtttgctcagttgagtgtcagctgatgtatgtcccttgatgtcaccctgatctgtcatgccccaccgccacccctactcccttcaaccctccctctttctgcccatttcctcccaccccctcactcccatttcctagcaaaatcagaagattgtgaagaggccggcttcaacaaaatgggataaaaaaataattttttaaaacttacaacactccgagttctgctttattctctagcaatccacagtacaagaacaagcaaatgccacagctgcacgactgttgctcatttttccaaaagctatttaatattcttagcaatcaatttggatatcccttaagtgaaaagaatctgaaatacactcaggtggtcttatttattggcaacaaaaggaattttctatccagaagcctatttctcctttcattgttgttatttctgttataatactttaattgtacatctgacaatactgcctcttttatgttgtatttagaaattaatatacttataaaattaagatttattagccaaacttgaattctagttttaaaactgactgtgaattttatttttcatatatttatgcattacacaccttagctataagaaaaaaagggttttgattatatgcttcttgcagttaatctcgttatttaaacaaaaagttttgggtctgtctttggagtatttgtaacttctaaattttgaaatgactgaattaggaatttggatgcttattcttttagtctgtttgcctaaaaaccaatttacaatctgactgtctcttgggagagggaggtgccttgcaaactttcacattaagaatgtgcctgaggctgctttactctggaatagtctcagatctaaaatttcctctatataaggtggcatatgttaagttttgcttcattggaccgtttagaatgctatgtaaaatgttgccattctgttagattgctaactatatacccatctctgatttggctctccttaagtgataggatttgttattctaaaggtgataaacttgaaaatatcagaatctgagttttacttgaaattttgcagaatacccaggtggagtgaaaattggaagggttttgtgcaatgactaaaaggtaaaacgctgttaaggttcaagaatcaatactttcaacccaagtagccctctgcttgactgtatattatggaactagtaaaccttaggattttgaaaattggagtctaatctttcaaggaggtgggctcccaggatggtaccattgctctttcctagctaaccctagatatggcagctctttaatgtacttcaaaaagcaaatatatattactaaggaaaaaaagttatttataattgccttgtcataattgttaaggtgttctagagccatttgcatacaatttaatgtaatttcattccattctattgtttacacaacgattactcgaagatgactgcaaaggtaaaaggaaaataaaagtgtattgcacaatgagaaaaaaaaaaaaaaa

SEQ ID NO: 254 - protein, 545 aa, Homo Sapiens
MAEPSGSPVHVQLPQQAAPVTAAAAAAPAAATAAPAPAAPAAPAPAPAPAAQAVGWPICRDAYELQEVIGSGATAVVQAALCKPRQERVAIKRINLEKCQTSMDELLKEIQAMSQCSHPNVVTYYTSFVVKDELWLVMKLLSGGSMLDIIKYIVNRGEHKNGVLEEAIIATILKEVLEGLDYLHRNGQIHRDLKAGNILLGEDGSVQIADFGVSAFLATGGDVTRNKVRKTFVGTPCWMAPEVMEQVRGYDFKADMWSFGITAIELATGAAPYHKYPPMKVLMLTLQNDPPTLETGVEDKEMMKKYGKSFRKLLSLCLQKDPSKRPTAAELLKCKFFQKAKNREYLIEKLLTRTPDIAQRAKKVRRVPGSSGHLHKTEDGDWEWSDDEMDEKSEEGKAAFSQEKSRRVKEENPEIAVSASTIPEQIQSLSVHDSQGPPNANEDYREASSCAVNLVLRLRNSRKELNDIRFEFTPGRDTADGVSQELFSAGLVDGHDVVIVAANLQKIVDDPKALKTLTFKLASGCDGSEIPDEVKLIGFAQLSVS

SEQ ID NO: 255 - DNA, 3871 bp, Homo Sapiens
ctgcagcctccgcagaggcgattggctgaagctaccggccgcgtggggcgggactcggttgccagggagcggcgcgggagccctgaggggactgcggcggctgcgcggaggagcgaggcacttgctggggtcggggctgcgcgacggcgcaggggctgcggggagcgccgcgcaggccgtgcagttcctagcgaggaggcgccgccgccattgccgctctctcggtgagcgcagccccgctctccgggccgggccttcgcgggccaccggcgccatgggccagtgcggcatcacctcctccaagaccgtgctggtctttctcaacctcatcttctggggggcagctggcattttatgctatgtgggagcctatgtcttcatcacttatgatgactatgaccacttctttgaagatgtgtacacgctcatccctgctgtagtgatcatagctgtaggagccctgcttttcatcattgggctaattggctgctgtgccacaatccgggaaagtcgctgtggacttgccacgtttgtcatcatcctgctcttggtttttgtcacagaagttgttgtagtggttttgggatatgtttacagagcaaaggtggaaaatgaggttgatcgcagcattcagaaagtgtataagacctacaatggaaccaaccctgatgctgctagccgggctattgattatgtacagagacagctgcattgttgtggaattcacaactactcagactgggaaaatacagattggttcaaagaaaccaaaaaccagagtgtccctcttagctgctgcagagagactgccagcaattgtaatggcagcctggcccacccttccgacctctatgctgaggggtgtgaggctctagtagtgaagaagctacaagaaatcatgatgcatgtgatctgggccgcactggcatttgcagctattcagctgctgggcatgctgtgtgcttgcatcgtgttgtgcagaaggagtagagatcctgcttacgagctcctcatcactggcggaacctatgcatagttgacaactcaagcctgagctttttggtcttgttctgatttggaaggtgaattgagcaggtctgctgctgttggcctctggagttcatttagttaaagcacatgtacactggtgttggacagagcagcttggcttttcatgtgcccacctacttacctactacctgcgactttctttttccttgttctagctgactcttcatgcccctaagattttaagtacgatggtgaacgttctaatttcagaaccaattgcgagtcatgtagtgtggtagaattaaaggaggacacgagcctgcttctgttacctccaagtggtaacaggactgatgccgaaatgtcaccaggtcctttcagtcttcacagtggagaactcttggccaaaggtttttgcggggaggaggaggaaaccagctttctggttaaggttaacaccagatggtgcccctcattggtgtccttttaaaaaatatttactgtagtccaataagatagcagctgtacaaaatgactaaaatagattgtaggatcatatggcgtatatcttggttcatcttcaaaatcagagactgagctttgaaactagtggtttttaatcaaagttggctttataggaggagtataatgtatgcactactgttttaaaagaattagtgtgagtgtgtttttgtatgaatgagcccattcatggtaagtcttaagcttgttggaaataatgtacccatgtagactagcaaaatagtatgtagatgtgatctcagttgtaaatagaaaaatctaattcaataaactctgtatcagcccccaacatattatttttcattatttgggggatatttcagttccagagcagcagtatcatgttttctttgttggtgctgtctatagttcatcatggtttacgtgtgttttcgttatagctgttgccagattctaaagggcttgatattcaaaaaaccacagatgctttcagtccagtatatcctagaaatatagagctctactttgtgcaatgcactggggatacagtggcgatactgtccttgtcttcaaggagttcggagtcctagtataggagacatacataggagaagataattttcacactgcagtggttgtagtaatagaatgggagtccaaaggggagttccggagaggtcaggggtgacttcctggaggagatgcccaagcttggaggctggataggctttgttgaaagatggtacacaagagtgtgaaacaaaattgtgtgtgcagggagcttaaaatacaaggctggggaaagaagttggagaagcaggaaagcccaggccctctagtgtcttacggaacatcctgtggaggtgagagctgacttgtaggtggaagcagctctttggaggtttgatttggaaggtgaactgagaagaaggtggtgatgcaagccggccgtgctgaagccaggatgaattggtgtgactgggcttcagttaggctggcatagcagttgagagagcttagcagtgggcagcagggcactgttgggggcggtggtgagcggtggattctggctgtttggaggcaggacagtggtggaattcgatcattgattggacgtgggacagagaagggagaagagaagactcatctaggatgagtcccaggtttctggctcagtcaactggggaaacaaagtcacagagctagggagtagttagagaacacatctgggggtgtgactcatggtcagttttgggctcgtcagttttgagatgcccaaatatcatgcagatctgtcccacctgaaaatggagaagacacgggaaaggagaggagtaaaaactaactccttttcacaaagtggaagttaccagaatgtgatttcagaggccccgggggatttatcatgtgactactgacccatcccacctcttgcccctgcctgttgcacagtgggcaagaatgtttgtgacctttcactaccaccacctcccccgagcatggtccccccagttttcaatatgaaccatcctgtgggtaccctgtcacaggctggccctgaggtgagcaatatttggactgtgatgttggttgttctccactctttctacaggacagaacagggcctctagagtgggaaatggctttgggaaatatgccaagcagtagccttgttcttcaacttgcccaagaggataattctccacacccttcctgtactcagtcctcagtttgcctggtgagagagcagcctcctcccgtgtgctctgccagctggacccagactggccatattaccagtgagaccaaaaagatggaggtggggaggtagctctgaggtctgggaaaccattccagctcctgccagttttaacttgtgtttaattcctggcacagttgtcctggaaatgcctttttctcttgcctgggaaccactagaaggggatgttgtctgtgttggccagggccatgcaaattcaacatcttgtttctgcccttcccccgtgtagctgaggctaggtgttggcattacccagtgcttgttcttcagagagcaaaagcactgctcgtcatgtctgaaatttagtgagtgagctcacccactaggctggtgtttcctgcccgtggctgcacattggaagcaccggggcactttgagaactacagatgcctgggtcccagagcatctaaggtgctctagggtgtgtccaggacacagccctggttgaggaccactgctatattgtatggcctcttttaaaaaagttaattttacttggaaatgatttcaaagctacagaaaagttgcaagaataaaaactgtacaaatgaggctcaaaaaaaaaaaaaaaaaaaa

SEQ ID NO: 256 - protein, 253 aa, Homo Sapiens
MGQCGITSSKTVLVFLNLIFWGAAGILCYVGAYVFITYDDYDHFFEDVYTLIPAVVIIAVGALLFIIGLIGCCATIRESRCGLATFVIILLLVFVTEVVVVVLGYVYRAKVENEVDRSIQKVYKTYNGTNPDAASRAIDYVQRQLHCCGIHNYSDWENTDWFKETKNQSVPLSCCRETASNCNGSLAHPSDLYAEGCEALVVKKLQEIMMHVIWAALAFAAIQLLGMLCACIVLCRRSRDPAYELLITGGTYA

SEQ ID NO: 257 - DNA, 7573 bp, Homo Sapiens
gcggaacgtgggctcgcgcgccccgcctttgtctcccgggcgcgagccgccgcagccccgcgcccgctgctcgctgcggagccgttttgtgccgcggcgcgggggaacggggacgcggggcggggggcgcggagccggcgggcgcagcctcagcatggacgtgacagtctcggagctcctggagctcttcctgcagagcccgctggtgacctgggtgaaaacttttggcccgtttggaagcggcagccaggacaacctgactatgtacatggatttagtggacggcatctttttgaaccaaattatgctgcaaatagatcccaggcccacaaatcaacgcatcaataagcacgtcaacaatgatgtgaaccttcgcattcagaatttgaccatcttggtgagaaacattaagacctactaccaggaagttctccagcagctgattgtaatgaatttgcccaatgttttgatgattggcagagacccactgtctgggaagagcatggaggaaatcaagaaggtgctgctgctggtgctgggctgtgctgtccagtgtgagaggaaagaggagttcattgaaagaatcaaacagctggacattgagacccaggctggcatcgtggcccatatccaggaggtgactcacaaccaagagaacgtgtttgacctgcagtggctggagctgcccgacgtggctccggaggagctggaggccctgtcgaggagcatggtgctccacctgcggaggctcatcgaccagcgggacgagtgcaccgagctgatcgtggacctcactcaggaacgggactacctgcaggcacagcatccacccagccccatcaagtcctccagcgccgactccactcccagccccaccagcagcctctctagcgaagacaagcagcacctggccgtagagctggccgacaccaaggccaggctgcggcgcgtcaggcaggagctggaggataagacagagcagcttgtggacaccagacatgaggtggaccagctggtgctggaactgcagaaagttaagcaggagaacatccagctagcggcagacgcccggtctgctcgtgcctatcgagacgagctggattccctgcgggagaaggcgaaccgcgtggagaggctggagctggagctgacccgctgcaaggagaagctgcacgacgtggacttctacaaggcccgcatggaggagctgagagaagataatatcattttaattgaaaccaaggccatgctggaggaacagctgactgctgctcgggcccggggcgataaagtccatgagctggaaaaggagaacctgcagctgaaatccaagcttcacgacctggaattggaccgggacacagataagaaacgaattgaggagctgctggaagaaaacatggtccttgagattgcacagaagcagagcatgaacgaatctgcccaccttggctgggagctggagcagctgtccaagaacgcagacttgtcagacgcctccaggaagtcgtttgtgtttgagctgaacgaatgtgcgtccagccgcatcctgaagctggagaaggagaatcagagcctccagagcaccatccaggggctgcgggacgcgtccctggtgttggaggagagcggcctcaagtgcggggagctggagaaggagaaccaccagctcagcaagaagattgaaaagttacaaacccagctggagagagaaaagcagagcaaccaagatctggagaccctcagtgaggagctgatcagagagaaggagcagctgcagagtgacatggagaccctgaaggctgacaaagccaggcagatcaaggaccttgagcaggaaaaggaccacctcaaccgagccatgtggtcgctgcgggagaggtcgcaggtcagcagtgaggcccgcatgaaagacgtggagaaggagaacaaagccctccaccagacggtgacggaggccaatggcaagctcagccagttggagtttgagaagcggcagctgcacagggacttggagcaggccaaggagaagggggagcgggcagagaagctggagagggagctacagcgactccaggaggagaacgggaggctggccaggaaggtgacctccctggagacagccaccgagaaagtcgaggccctggagcatgagagccagggcctgcagctggagaaccggactctgaggaagtctctggacaccttgcagaacgtgtccctgcagcttgagggcctggagcgtgacaacaagcagctggacgcagagaacctggagctgcgcaggctggtggagaccatgcgcttcaccagcaccaagctggcacagatggagagggagaaccagcagctggagcgtgagaaggaggagctgaggaagaacgtggatctgctcaaggcgctgggcaagaagtcagagcgcctggagctcagctaccagagcgtgagcgctgagaacctccggctgcagcagagcctggagagcagcagccacaagacgcagaccttggagagtgagctgggcgagctggaggctgagcgccaggcgctgcggcgggacctggaggccctccggctggccaatgcacagttggagggggccgagaaggacaggaaggccctggagcaggaggtggcccagctcgagaaggataagaagctgctggagaaggaggccaagcggctgtggcagcaggtggagctcaaggatgcagtcttggacgatagcactgccaaactgtccgccgttgagaaggagagccgcgcgctggacaaggagctggcccgctgcagggacgcagccggcaagctgaaggagctggagaaggacaaccgggacctcaccaagcaagtcaccgtgcatgcaaggacactgacaactctgagggaggacctggtgctcgagaagctgaagagccagcagctcagcagtgagctggacaagctgagccaggaactggagaaggtcggcctcaacagggagctgctgttgcaggaggacgacagcggcagtgacacaaaatacaagattttggagggcagaaatgaatcagcattaaaaacaacactagccatgaaagaagaaaagattgtgctcttagaagcacagatggaagagaaagcgagcctaaatcgccagttagagagtgagctgcagatgctaaagaaggagtgtgagaccctcaggcagaaccagggagaggggcagcacttgcagaactctttcaagcaccctgcggggaagacagccgccagtcaccaggggaaggaggcctgggggcccggccataaggaagccaccatggagcttctccgagtgaaggaccgggccatcgagctggagcggaataatgcagctctgcaggctgagaagcagctgctaaaggaacagctgcagcacctggagacccagaacgtgaccttcagcagccagatcttgacactgcagaaacagagcgccttcctgcaggagcacaacaccacactgcagacccagaccgccaagctgcaggtggagaactccacgctgagttcccagagcgcagcgctcaccgcgcagtacacgctgctgcagaaccaccacacggccaaggagacggagaacgaaagcctgcagaggcagcaggagcaacttacagcggcctacgaggccctgctgcaggaccacgagcacctgggcacgctgcacgagcggcaatcggccgagtacgaggccctcatccgccagcacagctgcctaaagacactgcatcggaatctggagctggagcacaaggagctcggggagaggcacggtgacatgctgaagcgcaaggcggagctggaggagcgggagaaggtcttgaccactgagcgagaggcgctgcagcaggagcagaggacaaacgccctcgccatgggcgagaaccagaggctgcggggcgagctggacagggtcaatttcctgcaccaccagctgaagggggagtacgaggagctgcacgcccacaccaaggagctgaaaacctcactgaacaacgcgcagctggagctcaaccgctggcaggcccgcttcgacgagctgaaggagcagcaccagaccatggacatctcgctgaccaagctggacaaccactgtgagctgctctcccgtctcaaggggaacttggaggaagaaaatcatcacctcctgagccagatccagctgttgagccagcagaaccagatgcttctggagcagaacatggagaacaaggagcagtaccatgaggagcagaagcagtacatagacaaattaaatgccttacgaagacataaggaaaagctggaagaaaaaatcatggatcaatacaagttctatgatcctcctccaaagaagaagaaccactggattggagccaaagccttagtcaaactcatcaaaccaaagaaagagggttcgagggaacgcttaaaatccaccgtggacagccctccctggcagctggagtcctcagaccccgcctcgccggcggcctctcagccgctcagatcacaggccgagaaccccgacacccccgcactgggctccaactgtgcagaagagcgcgacgcccacaacgggtctgtggggaaaggccctggggatctaaaaccaaagcgaggctccccacacagaggcagccttgaccgcacagatgcctccaccgatctggccatgaggtcctggccctcggagctgggctcccggacttgctcaacttcagccaccactacagccccttccaactccacccccatcgcccggcacccaggccgcaccaaaggctataactcagatgacaacctctgtgagccatccctggagtttgaggtccccaaccacaggcagtacgtgtcgcggccaagtagcttagagagcagtagaaacacatccagcaacagctcacctcttaacctaaaaggctcctccgagcagctccatggccggtctgagagcttcagcagcgaagacctgatccccagcagggacctggccactttgccccgggaagccagcacaccgggacgcaacgccctcggccgccacgagtaccccttgcctcggaacgggcctctcccacaggagggtgcccagaagaggggcacagcccctccctacgtcggagtgcggccctgctcggcctcccccagcagtgagatggtcaccttggaggagttcctggaggagagcaaccgcagctcccccacccatgacactcccagttgccgggatgacctgctgagtgactacttccgaaaggccagcgatcccccagccatcggaggccaaccaggaccacctgccaagaaagaaggggccaagatgcccaccaactttgtggcccccaccgtcaaaatggccgcccccacctcggaggggaggccgctgaagcccgggcagtacgtaaagccaaacttcagactgactgaggccgaggccccacccagcgtggccccgagacaggcccagcctccccagagcctgtctctgggcagaccccggcaggctccggtgcccccagcttcccatgcacctgccagccgcagtgcctccttgagccgggccttcagcctggcctcagctgaccttctccgggccagcgggccagaggcctgcaaacaggagtcccctcagaagctgggggctcctgaggccttagggggcagagagacaggcagccacaccctgcaaagccccgcaccccccagctcccatagcctggcccgggagcggaccccacttgtgggaaaggctggcagctcctgtcagggcccaggtccccgcagccggccgctggacacgaggcgcttctccctggctcccccaaaggaggagaggctggcccccctgcatcagtctgccacagcccccgccattgccactgcaggtgctggtgctgctgctgctggcagtggcagcaactcccagctcctgcacttctcacctgctgcagccccggctgccaggaccaagcccaaggcgcccccacgctcaggggaggtggccaccatcacccctgtccgggcagggctcagcctctcagagggagacggggtcccggggcagggctgcagtgaggggcttccggccaagagcccaggtcggtctcccgatttggctccccacctcggccgggccctggaggactgcagtcgagggagcgtctcaaagagcagtccggcctccccggagcccggcggggatccgcagaccgtgtggtatgagtacggctgtgtgtgactgtctcgtggttgagctcgcaaacctgaaaactactgacgcgccttccgactctcacggccttttctcttgcttgcctgcggtgccaggagagggtttggaatgaggaaaggggttcccacgcatttctgctgtttgttctgtgaatggaaacactgtgccaagccccaagaggattacgcttccaggtgtgtaacgtgttttctgtgtctgccgcttccagcagctgatatctttggaacaaataatccacgtcagcatggggaccaattaggatgcaatgacaaactgacttcccccaaagcagacactactccagtatgtcccagtagaacactcatttgcaatgtgttgagctccgttaagcacacacacactcacacaacaggcttacgaggctcaggcctggcgggtcagaaagcccactccctctcccaaggccactggatcccaggagaagcccagactggcgatactacaaaggtctccagggcctggcagaccccagagtcaggcctgctgttaaaaagtgagagtgctgctgttccattcctggggtcccaagcacttccctttaccccaggacccagggcagcctgcagggcagctggcggtggccttggccatttgcccccagcctccagctggctcctgagctctgcaccagggggtttggggaccacacaggcacctgccttcctagatttccctggctcacttttctgcaaacactggatctgccaggcctggggattggggggcaggaaagaggcccccatccagccccctccaggccagtgtgcacagtgcaccgaggggtcatccgcacagagcgaggtgcaagctcgatgtgtaacctggctgcggcacccgacatccccggtctcggggtgttgatttatttctgaataactttttgggtatagaaaccaattttttttaatatatgacatgtatatgtacacactcatgtgaaatatgtatactttggggggatctatttatgttccagtgggagtcactctcttctgtcgggaatcttatctgctgctttgtgtctttggtcagattcctgacaatttagtttcctgttgtaaaggtgcttttcctggggtgaactaaacctattgattttttttttttaagatttttttttccttttgatttaatatactgagaaagaaatgggagacttttgaatgttaacaagatccattttaggagtgtttggggttgtgtattaaatagccattcattctggaactcaaggacaggactgtaataaaatggaatggaaccgaaaaaaaaaaaaaaaaaaaaaaaaaaaaaaaa

SEQ ID NO: 258 - protein, 2028 aa, Homo Sapiens
MDVTVSELLELFLQSPLVTWVKTFGPFGSGSQDNLTMYMDLVDGIFLNQIMLQIDPRPTNQRINKHVNNDVNLRIQNLTILVRNIKTYYQEVLQQLIVMNLPNVLMIGRDPLSGKSMEEIKKVLLLVLGCAVQCERKEEFIERIKQLDIETQAGIVAHIQEVTHNQENVFDLQWLELPDVAPEELEALSRSMVLHLRRLIDQRDECTELIVDLTQERDYLQAQHPPSPIKSSSADSTPSPTSSLSSEDKQHLAVELADTKARLRRVRQELEDKTEQLVDTRHEVDQLVLELQKVKQENIQLAADARSARAYRDELDSLREKANRVERLELELTRCKEKLHDVDFYKARMEELREDNIILIETKAMLEEQLTAARARGDKVHELEKENLQLKSKLHDLELDRDTDKKRIEELLEENMVLEIAQKQSMNESAHLGWELEQLSKNADLSDASRKSFVFELNECASSRILKLEKENQSLQSTIQGLRDASLVLEESGLKCGELEKENHQLSKKIEKLQTQLEREKQSNQDLETLSEELIREKEQLQSDMETLKADKARQIKDLEQEKDHLNRAMWSLRERSQVSSEARMKDVEKENKALHQTVTEANGKLSQLEFEKRQLHRDLEQAKEKGERAEKLERELQRLQEENGRLARKVTSLETATEKVEALEHESQGLQLENRTLRKSLDTLQNVSLQLEGLERDNKQLDAENLELRRLVETMRFTSTKLAQMERENQQLEREKEELRKNVDLLKALGKKSERLELSYQSVSAENLRLQQSLESSSHKTQTLESELGELEAERQALRRDLEALRLANAQLEGAEKDRKALEQEVAQLEKDKKLLEKEAKRLWQQVELKDAVLDDSTAKLSAVEKESRALDKELARCRDAAGKLKELEKDNRDLTKQVTVHARTLTTLREDLVLEKLKSQQLSSELDKLSQELEKVGLNRELLLQEDDSGSDTKYKILEGRNESALKTTLAMKEEKIVLLEAQMEEKASLNRQLESELQMLKKECETLRQNQGEGQHLQNSFKHPAGKTAASHQGKEAWGPGHKEATMELLRVKDRAIELERNNAALQAEKQLLKEQLQHLETQNVTFSSQILTLQKQSAFLQEHNTTLQTQTAKLQVENSTLSSQSAALTAQYTLLQNHHTAKETENESLQRQQEQLTAAYEALLQDHEHLGTLHERQSAEYEALIRQHSCLKTLHRNLELEHKELGERHGDMLKRKAELEEREKVLTTEREALQQEQRTNALAMGENQRLRGELDRVNFLHHQLKGEYEELHAHTKELKTSLNNAQLELNRWQARFDELKEQHQTMDISLTKLDNHCELLSRLKGNLEEENHHLLSQIQLLSQQNQMLLEQNMENKEQYHEEQKQYIDKLNALRRHKEKLEEKIMDQYKFYDPPPKKKNHWIGAKALVKLIKPKKEGSRERLKSTVDSPPWQLESSDPASPAASQPLRSQAENPDTPALGSNCAEERDAHNGSVGKGPGDLKPKRGSPHRGSLDRTDASTDLAMRSWPSELGSRTCSTSATTTAPSNSTPIARHPGRTKGYNSDDNLCEPSLEFEVPNHRQYVSRPSSLESSRNTSSNSSPLNLKGSSEQLHGRSESFSSEDLIPSRDLATLPREASTPGRNALGRHEYPLPRNGPLPQEGAQKRGTAPPYVGVRPCSASPSSEMVTLEEFLEESNRSSPTHDTPSCRDDLLSDYFRKASDPPAIGGQPGPPAKKEGAKMPTNFVAPTVKMAAPTSEGRPLKPGQYVKPNFRLTEAEAPPSVAPRQAQPPQSLSLGRPRQAPVPPASHAPASRSASLSRAFSLASADLLRASGPEACKQESPQKLGAPEALGGRETGSHTLQSPAPPSSHSLARERTPLVGKAGSSCQGPGPRSRPLDTRRFSLAPPKEERLAPLHQSATAPAIATAGAGAAAAGSGSNSQLLHFSPAAAPAARTKPKAPPRSGEVATITPVRAGLSLSEGDGVPGQGCSEGLPAKSPGRSPDLAPHLGRALEDCSRGSVSKSSPASPEPGGDPQTVWYEYGCV

SEQ ID NO: 259 - DNA, 8240 bp, Homo Sapiens
cccctctcggtagccctgaggctctggcgccttcaagtgagaagctaagcaccagcctctgctgggctgcagaagcggcggcggcggcagcagcagcagcagcatcaggaaggcgctcgggccagcgcggtgaacccgggctgggcagcaggtcgcggagccgcgagccaggatggaggcagagggcagcagcgcgccggcccgggcgggcagcggagagggcagcgacagcgccggcggggccacgctcaaagcccccaagcatctctggaggcacgagcagcaccaccagtacccgctccggcagccccagttccgcctcctgcatccccatcaccacctgcccccgccgccgccaccctcgccccagccccagccccagtgtccgctacagccgccgccgccgccccccctgccgccgcccccgccgccgcccggggctgcccgcggccgctacgcctcgagcggggccaccggccgcgtccggcatcgcggctactcggacaccgagcgctacctgtactgtcgcgccatggaccgcacctcctacgcggtggagaccggccaccggcccggcctgaagaaatccaggatgtcctggccctcctcgttccagggactcaggcgttttgatgtggacaatggcacatctgcgggacggagtcccttggatcccatgaccagcccaggatccgggctaattctccaagcaaattttgtccacagtcaacgacgggagtccttcctgtatcgatccgacagcgattatgacctctctccaaagtctatgtcccggaactcctccattgccagtgatatacacggagatgacttgattgtgactccatttgctcaggtcttggccagtctgcgaactgtacgaaacaactttgctgcattaactaatttgcaagatcgagcacctagcaaaagatcacccatgtgcaaccaaccatccatcaacaaagccaccataacagaggaggcctaccagaaactggccagcgagaccctggaggagctggactggtgtctggaccagctagagaccctacagaccaggcactccgtcagtgagatggcctccaacaagtttaaaaggatgcttaatcgggagctcacccatctctctgaaatgagtcggtctggaaatcaagtgtcagagtttatatcaaacacattcttagataagcaacatgaagtggaaattccttctccaactcagaaggaaaaggagaaaaagaaaagaccaatgtctcagatcagtggagtcaagaaattgatgcacagctctagtctgactaattcaagtatcccaaggtttggagttaaaactgaacaagaagatgtccttgccaaggaactagaagatgtgaacaaatggggtcttcatgttttcagaatagcagagttgtctggtaaccggcccttgactgttatcatgcacaccatttttcaggaacgggatttattaaaaacatttaaaattccagtagatactttaattacatatcttatgactctcgaagaccattaccatgctgatgtggcctatcacaacaatatccatgctgcagatgttgtccagtctactcatgtgctattatctacacctgctttggaggctgtgtttacagatttggagattcttgcagcaatttttgccagtgcaatacatgatgtagatcatcctggtgtgtccaatcaatttctgatcaatacaaactctgaacttgccttgatgtacaatgattcctcagtcttagagaaccatcatttggctgtgggctttaaattgcttcaggaagaaaactgtgacattttccagaatttgaccaaaaaacaaagacaatctttaaggaaaatggtcattgacatcgtacttgcaacagatatgtcaaaacacatgaatctactggctgatttgaagactatggttgaaactaagaaagtgacaagctctggagttcttcttcttgataattattccgataggattcaggttcttcagaatatggtgcactgtgcagatctgagcaacccaacaaagcctctccagctgtaccgccagtggacggaccggataatggaggagttcttccgccaaggagaccgagagagggaacgtggcatggagataagccccatgtgtgacaagcacaatgcttccgtggaaaaatcacaggtgggcttcatagactatattgttcatcccctctgggagacatgggcagacctcgtccaccctgacgcccaggatattttggacactttggaggacaatcgtgaatggtaccagagcacaatccctcagagcccctctcctgcacctgatgacccagaggagggccggcagggtcaaactgagaaattccagtttgaactaactttagaggaagatggtgagtcagacacggaaaaggacagtggcagtcaagtggaagaagacactagctgcagtgactccaagactctttgtactcaagactcagagtctactgaaattccccttgatgaacaggttgaagaggaggcagtaggggaagaagaggaaagccagcctgaagcctgtgtcatagatgatcgttctcctgacacgtaacagtgcaaaaactttcatgccttttttttttttaagtagaaaaattgtttccaaagtgcatgtcacatgccacaaccacggtcacacctcactgtcatctgccaggacgtttgttgaacaaaactgaccttgactactcagtccagcgctcaggaatatcgtaaccagttttttcacctccatgtcatccgagcaaggtggacatcttcacgaacagcgtttttaacaagatttcagcttggtagagctgacaaagcagataaaatctactccaaattattttcaagagagtgtgactcatcaggcagcccaaaagtttattggacttggggtttctattcctttttatttgtttgcaatattttcagaagaaaggcattgcacagagtgaacttaatggacgaagcaacaaatatgtcaagaacaggacatagcacgaatctgttaccagtaggaggaggatgagccacagaaattgcataattttctaatttcaagtcttcctgatacatgactgaatagtgtggttcagtgagctgcactgacctctacattttgtatgatatgtaaaacagattttttgtagagcttacttttattattaaatgtattgaggtattatatttaaaaaaaactatgttcagaacttcatctgccactggttatttttttctaaggagtaacttgcaagttttcagtacaaatctgtgctacactggataaaaatctaatttatgaattttacttgcaccttatagttcatagcaattaactgatttgtagtgattcattgtttgttttatataccaatgacttccatattttaaaagagaaaaacaactttatgttgcaggaaaccctttttgtaagtctttattatttactttgcattttgtttcactctttccagataagcagagttgctcttcaccagtgtttttcttcatgtgcaaagtgactatttgttctataatacttttatgtgtgttatatcaaatgtgtcttaagcttcatgcaaactcagtcatcagttcgtgttgtctgaagcaagtgggagatatataaatacccagtagctaaaatggtcagtcttttttagatgttttcctacttagtatctcctaataacgttttgctgtgtcactagatgttcatttcacaagtgcatgtctttctaataatccacacatttcatgctctaataatccacacatttcatgctcatttttattgtttttacagccagttatagtaagaaaaaggtttttccccttgtgctgctttataatttagcgtgtgtctgaaccttatccatgtttgctagatgaggtcttgtcaaatatatcactaccattgtcaccggtgaaaagaaacaggtagttaagttagggttaacattcatttcaaccacgaggttgtatatcatgactagcttttactcttggtttacagagaaaagttaaacagccaactaggcagtttttaagaatattaacaatatattaacaaacaccaatacaactaatcctatttggttttaatgatttcaccatgggattaagaactatatcaggaacatccctgagaaacggttttaagtgtagcaactactcttccttaatggacagccacataacgtgtaggaagtcctttatcacttatcctcgatccataagcatatcttgcagaggggaactacttctttaaacacatggagggaaagaagatgatgccactggcaccagagggttagtactgtgatgcatcctaaaatatttattatattggtaaaaattctggttaaataaaaaattagagatcactcttggctgatttcagcaccaggaactgtattacagttttagagattaattcctagtgtttacctgattatagcagttggcatcatggggcatttaattctgactttatccccacgtcagccttaataaagtcttctttaccttctctatgaagactttaaagcccaaataatcatttttcacattgatattcaagaattgagatagatagaagccaaagtgggtatctgacaagtggaaaatcaaacgtttaagaagaattacaactctgaaaagcatttatatgtggaacttctcaaggagcctcctggggactggaaagtaagtcatcagccaggcaaatgactcatgctgaagagagtccccatttcagtcccctgagatctagctgatgcttagatcctttgaaataaaaattatgtctttataactctgatcttttacataaagcagaagaggaatcaactagttaattgcaaggtttctactctgtttcctctgtaaagatcagatggtaatctttcaaataagaaaaaaataaagacgtatgtttgaccaagtagtttcacaagaatatttgggaacttgtttcttttaattttatttgtccctgagtgaagtctagaaagaaaggtaaagagtctagagtttattcctctttccaaaacattctcattcctctcctccctacacttagtatttcccccacagagtgcctagaatcttaataatgaataaaataaaaagcagcaatatgtcattaacaaatccagacctgaaagggtaaagggtttataactgcactaataaagagaggctctttttttttcttccagtttgttggtttttaatggtaccgtgttgtaaagatacccactaatggacaatcaaattgcagaaaaggctcaatatccaagagacagggactaatgcactgtacaatctgcttatccttgcccttctctcttgccaaagtgtgcttcagaaatatatactgctttaaaaaagaataaaagaatatccttttacaagtggctttacatttcctaaaatgccataagaaaatgcaatatctgggtactgtatggggaaaaaaatgtccaagtttgtgtaaaaccagtgcatttcagcttgcaagttactgaacacaataatgctgttttaattttgttttatatcagttaaaattcacaataatgtagatagaacaaattacagacaaggaaagaaaaaacttgaatgaaatggattttacagaaagctttatgataatttttgaatgcattatttattttttgtgccatgcattttttttctcaccaaatgaccttacctgtaatacagtcttgtttgtctgtttacaaccatgtatttattgcaatgtacatactgtaatgttaattgtaaattatctgttcttattaaaacatcatcccatgatgggatggtgttgatatatttggaaactcttggtgagagaatgaatggtgtgtatacatactctgtacatttttcttttctcctgtaatatagtcttgtcaccttagagcttgtttatggaagattcaagaaaactataaaatacttaaagatatataaatttaaaaaaacatagctgcaggtctttggtcccagggctgtgccttaactttaaccaatattttcttctgttttgctgcatttgaaaggtaacagtggagctagggctgggcattttacatccaggcttttaattgattagaattctgccaataggtggattttacaaaaccacagacaacctctgaaagattctgagacccttttgagacagaagctcttaagtacttcttgccagggagcagcactgcatgtgtgatggttgtttgccatctgttgatcaggaactacttcagctacttgcatttgattatttcctttttttttttttttaactcggaaacacaactggggaaatatattctttcccagtgattataaacaatctttttcttttttttaagtccttttggcttctagagctcataggaaaatggacttgatttgaaattggagccagagtttactcgtgttggttatctattcatcagcttcctgacatgttaagagaatacattaaagagaaaatactgttttttaatcctaaaatttttcttccactaagataaaccaaatgtccttacatatatgtaaacccatctatttaaacgcaaaggtgggttgatgtcagtttacatagcagaaagcattcactatcctctaagatttgtttctgcaaaactttcattgctttagaattttaaaatttcaccttgtacaatggccagcccctaaagcaggaaacatttataatggattatatggaaacatcctcccagtacttgcccagcccttgaatcatgtggcttttcagtgaaaggaaagattctttttctaggaaaaatgagcctattttattttattttattttattttttgacacaaactgtagattttagcagccctggcccaaaggaatttgattacttttgttttaaacagtacaaaggggacactataattacaaaaacatccttaactgatttgagttgtttttatttctttggatatattttcagagtggtaaattgtgtgtgagaattacaaatgattattcttttagtggtttcttagcctctcttacagcccacggggatagtactgtacatcaataccttcatatgaaatttttatatgcaatgaaaataaaagcatgggttgattctgcctatttatgactcaatcttttacaaataaaagattattcattttaaattatagttcaatcagcatgtctcttaggatactgaacgtggttgaaatgaaaggatagtgacatcataagttagtactgatattcataaccaaataaagccaacttgagtaattttgctacattaaaaattaccaaaattacttagatggcctataagattaagcatggtgttttctaagcaagctttgaaaggggccttccatacttacttaattgaatattctgggatattgaaaattattcagatacttgacaattatttttggttacctactccgcaaactacaaagttttaaggactcaacaataagttaatgagacacagtgtttgctttcatggagcttacagtctggaggggacaaaggcttaaacaatactcatataattatatatgtgatcagtacaatgaaggagctcagtggggtaaataagcaggaacctgaacttgatctgttccggagggccacagaaggcttccttgaggccttgagaaagtgatttgcatctgagttctgaaggattgtaagaggtaactagggaaaaagttgacaggaagaggaaggggatccagacaagaaacatttgcaaagatcttgaggcataaatgagcttgagacatctggagaaactgaggaaaagtgagagagtaggcagggcctggagccgcagagccattgctaaccatcctgtgtgagatatcccccattctgtagctttattctcataaccctgctcaattttctttataacacttctcacagatttatatacgtgtttgtttttgttatctgtctctcccaccagaccacagctccatgagagcaaggtctttgcttaccaatatatcactagcacttaaaactatgcctggtacacagtaggttcttaatatgtgttgaatatagccatcaaattgatattggatataattcaatctgataagatattttgagatattaaagagtttttaacttgataccataaaaaaaaaaaaaaaaa

SEQ ID NO: 260 - protein, 809 aa, Homo Sapiens
MEAEGSSAPARAGSGEGSDSAGGATLKAPKHLWRHEQHHQYPLRQPQFRLLHPHHHLPPPPPPSPQPQPQCPLQPPPPPPLPPPPPPPGAARGRYASSGATGRVRHRGYSDTERYLYCRAMDRTSYAVETGHRPGLKKSRMSWPSSFQGLRRFDVDNGTSAGRSPLDPMTSPGSGLILQANFVHSQRRESFLYRSDSDYDLSPKSMSRNSSIASDIHGDDLIVTPFAQVLASLRTVRNNFAALTNLQDRAPSKRSPMCNQPSINKATITEEAYQKLASETLEELDWCLDQLETLQTRHSVSEMASNKFKRMLNRELTHLSEMSRSGNQVSEFISNTFLDKQHEVEIPSPTQKEKEKKKRPMSQISGVKKLMHSSSLTNSSIPRFGVKTEQEDVLAKELEDVNKWGLHVFRIAELSGNRPLTVIMHTIFQERDLLKTFKIPVDTLITYLMTLEDHYHADVAYHNNIHAADVVQSTHVLLSTPALEAVFTDLEILAAIFASAIHDVDHPGVSNQFLINTNSELALMYNDSSVLENHHLAVGFKLLQEENCDIFQNLTKKQRQSLRKMVIDIVLATDMSKHMNLLADLKTMVETKKVTSSGVLLLDNYSDRIQVLQNMVHCADLSNPTKPLQLYRQWTDRIMEEFFRQGDRERERGMEISPMCDKHNASVEKSQVGFIDYIVHPLWETWADLVHPDAQDILDTLEDNREWYQSTIPQSPSPAPDDPEEGRQGQTEKFQFELTLEEDGESDTEKDSGSQVEEDTSCSDSKTLCTQDSESTEIPLDEQVEEEAVGEEEESQPEACVIDDRSPDT

SEQ ID NO: 261 - DNA, 2521 bp, Homo Sapiens
aggagcttagagtggagtttacaggaatgaatcactgattagcggcaggcctaagtgtgggcactgtcgcaccacacacccagatactactccaggcacgggcattaggggctcccacaggctggacaggccttggactttcctggttgaaccgtgaggccgcggtgtcagtccacactccactgtgggtggcgggttcggccccgcgaggaggcgccgctctcaaaccccacggtcccgcgcagcgaagaggcgaggcggccgcggaaggcaggcgcagcccactcttcccgagaggccccgacatctcccggataatctggagctttcaaaatgtttgccaaagcaaccaggaattttcttagagaagttgatgctgatggtgacctgattgcagtatcaaatctgaatgactctgataagttacagcttctaagtctggtgacaaaaaagaagagattctggtgctggcagagacccaagtaccagtttttatccctcacccttggcgatgtactcatagaagaccaatttccgagtccagtggtcgtggagtcggactttgtgaaatacgagggcaagtttgcaaaccacgtgagtggaaccctggagactgcactggggaaggtcaagctgaacctggggggcagcagccgcgtagagagccagtcttcatttggaaccctgaggaagcaggaggtggatttgcagcagctcatcagagactctgccgagagaacaataaatctgagaaaccctgtgctccagcaggtgctggaaggaaggaatgaggtcctgtgcgttttgacacagaagatcacgacgatgcagaagtgtgtgatctctgagcacatgcaggtcgaggagaagtgtggtggcatcgtgggcatccagaccaagacggtgcaggtgtcagcgacggaggatgggaatgtcaccaaggactccaacgtggtgctggagatcccagctgccaccaccattgcctacggtgtcattgagttatacgtgaaactggacggccagttcgagttctgccttctccgagggaagcaaggtggcttcgagaacaagaagagaattgactctgtctacctggaccccctggtctttcgagagtttgcattcatagacatgccagatgctgcgcatgggatatcttcccaggatggaccattaagtgttttaaagcaagcgaccctgctcctggagaggaatttccatccatttgcggagctgcctgagccacaacagacagctttgagtgacatcttccaggcggtcctatttgatgatgaactactcatggtcctggaaccagtgtgcgatgacctggtcagcggcctctcgcccacagtggcggtgctgggggagctgaagccccggcagcagcaggaccttgtggccttcctgcagctggtggggtgcagcttacagggtgggtgtccgggccccgaggatgcaggcagcaagcagctgtttatgacagcctacttcttggtcagtgccctcgcagaaatgccagatagcgcagcagctctgctgggcacttgctgcaaactccagatcattcccacactgtgccacttgcttcgtgctctgtctgatgatggagtatctgatcttgaagacccaaccttgactcccctgaaagatacagaaaggtttgggattgtgcagcgcttgtttgcctcagctgacattagtctggagagactgaagtcatctgtgaaagctgtcattctgaaggactctaaagtcttcccactgcttctttgtataaccctgaatggactctgtgctttaggcagagaacattcatgatgtcatatgtgaactagaagtacgtgttactggccaaggctatttttcagaactgttaaaggtcatatgcacgttaaaagttgaccaatgaaatgaatttacagaacagtttaagaagtggtgacattttgcatgatgaatgacctgacttttagccaccaggtactctttaaacagttttccttatcagaggccctcctgtgctggtgacccagcatctgagttaggttccagcatgtaaagagctgggagggcggagaattcttagcatacattcagacgttttttctgcacaataataagtccatctgtcacttgcattccactttttgttacatagaaagagtctgaccctttaatccaaaaggtctttttacattgtgaatgctgtgggaaggcaatttctctgcacacaagaggctacgttttggaagtgatgtatgttatttgatgactgaaaatgaactgtaaatgctcctagagtatattcctctgctgaacaaaattaaacttcaaaaaaatctaacagtaacacacccctgcttgggaccctagctatatgcattttatgtgaccttgccatgcttcagtgaacatactaattctatgtctagcacatgttgatttcctatgtattctgggtattctattaaaggaaactttgaactatgaaaaaaaaaaaaaaaaaaaaaaaaaa

SEQ ID NO: 262 - protein, 496 aa, Homo Sapiens
MFAKATRNFLREVDADGDLIAVSNLNDSDKLQLLSLVTKKKRFWCWQRPKYQFLSLTLGDVLIEDQFPSPVVVESDFVKYEGKFANHVSGTLETALGKVKLNLGGSSRVESQSSFGTLRKQEVDLQQLIRDSAERTINLRNPVLQQVLEGRNEVLCVLTQKITTMQKCVISEHMQVEEKCGGIVGIQTKTVQVSATEDGNVTKDSNVVLEIPAATTIAYGVIELYVKLDGQFEFCLLRGKQGGFENKKRIDSVYLDPLVFREFAFIDMPDAAHGISSQDGPLSVLKQATLLLERNFHPFAELPEPQQTALSDIFQAVLFDDELLMVLEPVCDDLVSGLSPTVAVLGELKPRQQQDLVAFLQLVGCSLQGGCPGPEDAGSKQLFMTAYFLVSALAEMPDSAAALLGTCCKLQIIPTLCHLLRALSDDGVSDLEDPTLTPLKDTERFGIVQRLFASADISLERLKSSVKAVILKDSKVFPLLLCITLNGLCALGREHS

SEQ ID NO: 263 - DNA, 3549 bp, Homo Sapiens
acatctggcggctgccctcccttgtttccgctgcatccagacttcctcaggcggtggctggaggctgcgcatctggggctttaaacatacaaagggattgccaggacctgcggcggcggcggcggcggcgggggctggggcgcgggggccggaccatgagccgctgagccgggcaaaccccaggccaccgagccagcggaccctcggagcgcagccctgcgccgcggagcaggctccaaccaggcggcgaggcggccacacgcaccgagccagcgacccccgggcgacgcgcggggccagggagcgctacgatggaggcgctaatggcccggggcgcgctcacgggtcccctgagggcgctctgtctcctgggctgcctgctgagccacgccgccgccgcgccgtcgcccatcatcaagttccccggcgatgtcgcccccaaaacggacaaagagttggcagtgcaatacctgaacaccttctatggctgccccaaggagagctgcaacctgtttgtgctgaaggacacactaaagaagatgcagaagttctttggactgccccagacaggtgatcttgaccagaataccatcgagaccatgcggaagccacgctgcggcaacccagatgtggccaactacaacttcttccctcgcaagcccaagtgggacaagaaccagatcacatacaggatcattggctacacacctgatctggacccagagacagtggatgatgcctttgctcgtgccttccaagtctggagcgatgtgaccccactgcggttttctcgaatccatgatggagaggcagacatcatgatcaactttggccgctgggagcatggcgatggatacccctttgacggtaaggacggactcctggctcatgccttcgccccaggcactggtgttgggggagactcccattttgatgacgatgagctatggaccttgggagaaggccaagtggtccgtgtgaagtatgggaacgccgatggggagtactgcaagttccccttcttgttcaatggcaaggagtacaacagctgcactgataccggccgcagcgatggcttcctctggtgctccaccacctacaactttgagaaggatggcaagtacggcttctgtccccatgaagccctgttcaccatgggcggcaacgctgaaggacagccctgcaagtttccattccgcttccagggcacatcctatgacagctgcaccactgagggccgcacggatggctaccgctggtgcggcaccactgaggactacgaccgcgacaagaagtatggcttctgccctgagaccgccatgtccactgttggtgggaactcagaaggtgccccctgtgtcttccccttcactttcctgggcaacaaatatgagagctgcaccagcgccggccgcagtgacggaaagatgtggtgtgcgaccacagccaactacgatgatgaccgcaagtggggcttctgccctgaccaagggtacagcctgttcctcgtggcagcccacgagtttggccacgccatggggctggagcactcccaagaccctggggccctgatggcacccatttacacctacaccaagaacttccgtctgtcccaggatgacatcaagggcattcaggagctctatggggcctctcctgacattgaccttggcaccggccccacccccacgctgggccctgtcactcctgagatctgcaaacaggacattgtatttgatggcatcgctcagatccgtggtgagatcttcttcttcaaggaccggttcatttggcggactgtgacgccacgtgacaagcccatggggcccctgctggtggccacattctggcctgagctcccggaaaagattgatgcggtatacgaggccccacaggaggagaaggctgtgttctttgcagggaatgaatactggatctactcagccagcaccctggagcgagggtaccccaagccactgaccagcctgggactgccccctgatgtccagcgagtggatgccgcctttaactggagcaaaaacaagaagacatacatctttgctggagacaaattctggagatacaatgaggtgaagaagaaaatggatcctggcttccccaagctcatcgcagatgcctggaatgccatccccgataacctggatgccgtcgtggacctgcagggcggcggtcacagctacttcttcaagggtgcctattacctgaagctggagaaccaaagtctgaagagcgtgaagtttggaagcatcaaatccgactggctaggctgctgagctggccctggctcccacaggcccttcctctccactgccttcgatacaccgggcctggagaactagagaaggacccggaggggcctggcagccgtgccttcagctctacagctaatcagcattctcactcctacctggtaatttaagattccagagagtggctcctcccggtgcccaagaatagatgctgactgtactcctcccaggcgccccttccccctccaatcccaccaaccctcagagccacccctaaagagatactttgatattttcaacgcagccctgctttgggctgccctggtgctgccacacttcaggctcttctcctttcacaaccttctgtggctcacagaacccttggagccaatggagactgtctcaagagggcactggtggcccgacagcctggcacagggcagtgggacagggcatggccaggtggccactccagacccctggcttttcactgctggctgccttagaacctttcttacattagcagtttgctttgtatgcactttgtttttttctttgggtcttgttttttttttccacttagaaattgcatttcctgacagaaggactcaggttgtctgaagtcactgcacagtgcatctcagcccacatagtgatggttcccctgttcactctacttagcatgtccctaccgagtctcttctccactggatggaggaaaaccaagccgtggcttcccgctcagccctccctgcccctcccttcaaccattccccatgggaaatgtcaacaagtatgaataaagacacctactgagtggccgtgtttgccatctgttttagcagagcctagacaagggccacagacccagccagaagcggaaacttaaaaagtccgaatctctgctccctgcagggcacaggtgatggtgtctgctggaaaggtcagagcttccaaagtaaacagcaagagaacctcagggagagtaagctctagtccctctgtcctgtagaaagagccctgaagaatcagcaattttgttgctttattgtggcatctgttcgaggtttgcttcctctttaagtctgtttcttcattagcaatcatatcagttttaatgctactactaacaatgaacagtaacaataatatccccctcaattaatagagtgctttctatgtgcaaggcacttttcacgtgtcacctattttaacctttccaaccacataaataaaaaaggccattattagttgaaaaaaaaaaaaaaaaaaaaaaaaa

SEQ ID NO: 264 - protein, 660 aa, Homo Sapiens
MEALMARGALTGPLRALCLLGCLLSHAAAAPSPIIKFPGDVAPKTDKELAVQYLNTFYGCPKESCNLFVLKDTLKKMQKFFGLPQTGDLDQNTIETMRKPRCGNPDVANYNFFPRKPKWDKNQITYRIIGYTPDLDPETVDDAFARAFQVWSDVTPLRFSRIHDGEADIMINFGRWEHGDGYPFDGKDGLLAHAFAPGTGVGGDSHFDDDELWTLGEGQVVRVKYGNADGEYCKFPFLFNGKEYNSCTDTGRSDGFLWCSTTYNFEKDGKYGFCPHEALFTMGGNAEGQPCKFPFRFQGTSYDSCTTEGRTDGYRWCGTTEDYDRDKKYGFCPETAMSTVGGNSEGAPCVFPFTFLGNKYESCTSAGRSDGKMWCATTANYDDDRKWGFCPDQGYSLFLVAAHEFGHAMGLEHSQDPGALMAPIYTYTKNFRLSQDDIKGIQELYGASPDIDLGTGPTPTLGPVTPEICKQDIVFDGIAQIRGEIFFFKDRFIWRTVTPRDKPMGPLLVATFWPELPEKIDAVYEAPQEEKAVFFAGNEYWIYSASTLERGYPKPLTSLGLPPDVQRVDAAFNWSKNKKTYIFAGDKFWRYNEVKKKMDPGFPKLIADAWNAIPDNLDAVVDLQGGGHSYFFKGAYYLKLENQSLKSVKFGSIKSDWLGC

SEQ ID NO: 265 - DNA, 3903 bp, Homo Sapiens
agtgtgccaggaagggggccgactgagcagtgtgtggaagctgtcgtggaggtgaccgtggggggatgagaaaaggggaaggaaggaacagacagcaccagagggacttgaacaaagggagaagggggattaaagtcaaatcactgtcagcagcccaggagcagacaaaaccaccagagtaagccctgaaatggaaatgagagggaaaagaagcaagccgctaacagctaccaagaagaggaggaagtgggagatgcgctgcttcctgtagaaagaacgttgattgaagacaaagctgggtggggactagtccctgggctgcagccgctgctacacatactcacaacgctgccgccgcgctccgtgggcaactcctactactgctgggctgggctgggctgggctgggctgcgccggagctcgcctgcacagatcagctccggagaggggaaaaccacgctcctcggaccaagcctcgggagctaagccagatctgccagtgagcctcaggctttaggaactgaagagtgtttctgaaagatctatccagcactccgatggccagcaacaacaccgccagcatagcacaagccaggaagctggtagagcagcttaagatggaagccaatatcgacaggataaaggtgtccaaggcagctgcagatttgatggcctactgtgaagcacatgccaaggaagaccccctcctgacccctgttccggcttcagaaaacccgtttagggagaagaagtttttctgtgccatcctttaagtctttgagaggggcctgaagagcctccgggctcctgggacattgatgtagagtttttagtgaagtgggcacctttctagtccacggcatttgaagagagcgaggagaaccattctggaaactctaggctatgcatgtttaaagatctggtcccctttatgagaatgcaagccgatccacatcctgacttaagagatctgattctgacgaactgcctggaggaggggaatatataaaaataaaattggtgtcacttcttttctgctatcccccagccccccccccaaaatcctcatgtttctgcttcatattttgaaaaataacaattaaaacagacagctgtactgaggtaagatatgtgtgaccttcttggaatgaatattgtctttagaataccctttgataagctgagctgtcccgtgtagatgcaattcggtttaatggcattgatgtatagtcactgtgcctttctttttctttcttccttctcctctacccctccttccacccctccccattagagtagtgtggagataaggctggactggtctatcagattgaactccaagaatgatcacacaaaatgtttagggagatgttccccgtggtgtatcctcatggtaacaacgacaaaaaatgccggttgtctgtgttctcttttcactattcctaacatgtgtacatgatagctttgattctgcaagtaaaagtaaatcctgtgttgtgactggtgctttcatatatttgtgacaatttttgagtaatattgcatgaaaatgtccctatgttacatccattcagaagttttgttgttttactctaaagctgggaaaggaaatgagagggaaaagaccccggagagggaagaaaatctcagtattttgaaaattgagattacttcagagccttagccacacctaaaatacctcctagttaatagtggtataaatgcctcttcaatacgttttccagaatccaaagcattttggtttatccaggacccagggcagcacagctgtcaccaagcaggagagttaaggattcaccatgagctgggaaatgcttttgccatgagtatgagcaaattccctctttccctgaatcatggacattctagattaaaagaacatttttttgtgctcttaacaagaaaaccatggccctcctttgttcaagtatcagaagaaataaacccacagctccagagaaggtgaccattctcagaactccagctattcactctccagggagaaggacctcaaatcgccactctttgggcggcaggtgcggtccccacggccggctctacgaggaagagttctggctcttttgtccactgagatggtcttggtttttcacttaacaaattttttaatggaatctttgtttttgttctccatcttgtttgttagagtctctcggcctttatttacaaattccttgcaactagagcgctccttccccaagatatggtagtgagagtaatttttcattgtagctgtagtctccatcagtaacagcaggccctggaagacttgatcacctttttctgtgtcattttcagtcaaagagggcctctcttacatcttgtttgctttcaaatccccaaatatcatctccatctcccaattaattttattgtctctttcctctctattcgctttctcctgttttttttttaaaaaaaaagcatgaaaaaggaagagaaaaagtttgatatgccaaggacagattttgaaacagacttggtaaatgttttccttagctccttcatgggcatgctggtgaaagaataaatacatccaattaaagctcatgctggggtcggggagaagaggatactgaaacatttgtgaaatgtatgaatgcacttctgtaaccagatacttctgttcttctgttcaaattgtggggtttttgttacagttaggacgcccatgaagatttaggggtgaaaaaaacagcagagtatttattaaactacagcattgtacaattagcttagtaacactatggaataagctaaaacatatcacagtttttacatgggccaaaacatgaattgagtatgtggtcacatgaaaacacggatgaatgaataaaacactctttggtggtgactgaggcatcattagaaggcccagacgatttccactattcacagcatttccttttctcagaaggactctttatatttccatgtaaatctagatctttggagcaattaagatggaattacaatttctagggagcattttaaggaaaatgttttggctttttcataattttatgtcttacagtatggaattataatacgaaaatctttatatgagttttggcttcttggtatttgtacttattcaggggaaaaagtctttcgattacttatgcctctatagagcttaatttcttgagaaattcaacagtcattttcaccagcataattttatcttaaggaataactaataggaaaagtcagcttaattatttaaggccctagtttctacatataatatattcgatagaaatgaaaatctgccgtggaattaactaataagtagtaacaataaacttcatatttagaatgcaaagtctataaagaataattttacatgatcctcaatatcaactccagtttaaaaagtgttatttttaaaacatttgaaaccaagtactgtttaatttcaatcagaagatgcaaatacatactttgatctatgtttgattttgctaataatatttgaaggagattgcctaccaaggacaaaacaataaatttaaaaatcaaacgatttctccatacgctcatagtcacatatggaattttgagaaaataaagcatgctgtctttaggaatttttatacttctttgtctttcttccttaatatttgcttctagctgctcttggcaatgatgaattgttatgtatgcattaatgttttgcagcccaaaagttgttcacatttttcctatataagatctgtggagtgtgtgtttcaaagagagaactacagaaatgttaaagcaggaaaacctgaatgtgatgtgcacattttcatcccacatggacaatgtatgtgttttaataaatggaattttcagattcatttcaaaaaaaaaaaaaaaaaa

SEQ ID NO: 266 - protein, 71 aa, Homo Sapiens
MASNNTASIAQARKLVEQLKMEANIDRIKVSKAAADLMAYCEAHAKEDPLLTPVPASENPFREKKFFCAIL

SEQ ID NO: 267 - DNA, 5143 bp, Homo Sapiens
agttggaaagagaccacagactttgagggaagctcactcaggatctgctctccggcaaagtagtaagtgaggtgctgagagcagaatgagctactttgtggattctgctgggagcagccccgtcccttactcagcgcctcgtcctgcagtggtgaggcaaggacctagcaacacttatgaagatcctcgaatgaactgtggtttccagtccaattatcaccagcaaagaccttgctaccccttttgggatgagatggcaactcaggaagttcctactggtcttgaacactgtgtctcagatatggaatgtgcagatgtcccactattaactccaagcagcaaagaaatgatgtctcaagcattaaaagctactttcagtggtttcactaaagaacagcaacgactggggatcccaaaagacccccggcagtggacagaaacccatgttcgggactgggtgatgtgggctgtgaatgaattcagcctgaaaggtgtagacttccagaagttctgtatgaatggagcagccctctgcgccctgggtaaagactgctttctcgagctggccccagactttgttggggacatcttatgggaacatctagagatcctgcagaaagaggatgtgaaaccatatcaagttaatggagtcaacccagcctatccagaatcccgctatacctcggattacttcattagctatggtattgagcatgcccagtgtgttccaccatcggagttctcagagcccagcttcatcacagagtcctatcagacgctccatcccatcagctcggaagagctcctctccctcaagtatgagaatgactacccctcggtcattctccgagaccctctccagacagacaccttgcagaatgactactttgctatcaaacaagaagtcgtcaccccagacaacatgtgcatggggaggaccagtcgtggtaaactcgggggccaggactcttttgaaagcatagagagctacgatagttgtgatcgcctcacccagtcctggagcagccagtcatctttcaacagcctgcagcgtgttccctcctatgacagcttcgactcagaggactatccggctgccctgcccaaccacaagcccaagggcaccttcaaggactatgtgcgggaccgtgctgacctcaataaggacaagcctgtcattcctgctgctgccctagctggctacacaggcagtggaccaatccagctatggcagtttcttctggaattactcactgataaatcctgtcagtcttttatcagctggacaggagatggctgggaattcaaactttctgacccagatgaggtggccaggagatggggaaagaggaaaaacaaacctaagatgaattatgagaaactgagccgtggcctacgctactattacgacaaaaacatcatccacaagacagcggggaaacgctacgtgtaccgctttgtgtgtgacctgcagagcctgctggggtacacccctgaggagctgcacgccatgctggacgtcaagccagatgccgacgagtgatggcactgaaggggctggggaaaccctgctgagaccttccaaggacagccgtgttggttggactctgaattttgaattgttattctattttttattttccagaactcattttttaccttcaggggtgggagctaagtcagttgcagctgtaatcaattgtgcgcagttgggaaaggaaagccaggacttgtggggtgggtgggaccagaaattcttgagcaaattttcaggagagggagaagggccttctcagaagcttgaaggctctggcttaacagagaaagagactaatgtgtccaatcatttttaaaaatcatccatgaaaaagtgtcttgagttgtggacccattagcaagtgacattgtcacatcagaactcatgaaactgatgtaaggcaattaatttgcttctgtttttaggtctgggagggcaaaaaagaggtgggtgggatgaaacatgttttggggggggatgcactgaaaatctgagaactatttacctatcactctagttttgaagcaaagatggacttcagtggggaggggccaaaaccgttgttgtgttaaaatttattttattaaattttgtgccagtattttttttcttaaaaatcgtcttaagctctaaggtggtctcagtattgcaatatcatgtaagtttgtttttatttgccggctgaggattctgtcacaatgaaagaaaactgtttatatagaccccattggaaaagcaaaacgctctcactgagatcagggatcccaaattcatgggacttatataagaaggacaattaatgctgatttgggtacaggggaattatgtgtgtgaatgtcatctacaattaaaaaaaattagcacatccctttacttacttgttatcagtggattctcggggtttggacttaatgttgagctaagaagcattaagtctttgaactgaatgtattttgcatccctggttttggacgacagtaaacgtaggagcactgttgaagtcctggaagggagatcgaaggaggaagattgacttggttctttcttagtcctatatctgtagcatagatgacttggaataaaagctgtatgcatgggcattacccctcaggtcctaagaaataagtcctgaatgcatgtcgttccaaactaacactctgtaatttttcttttatgtcttattttccaagagtcctccattttttgcaccccctcaccgccaactctgttattcagtagagagaagtgtacggctttctgattggtgagtgaaaaagtaacttgagacacgacctaagttgaagagtttagacttgctgagttttagaagtgatggaaattaagagagcatttcaataaaatgtgacttggctgtctttggaagagaagtgcaaggctttcctttgaagaatttaaattagtccggtaggatgtcaggtgagactgtgtatgcaaaatgaatggcacaggtgatgccagggcctcttgcttgggtctgatgtcttggcacagggtaagtgaaggttaattccagaagagaggaatgacttgaaggcaaaggaaactaaggaaggaggttcagtgaggaaaataaggttgtccatgagatttgaatagatttttagttcccccaaggtttaaatacaaacatagtcaagcaaggtagtcatctttctgctggttgtgagggggaatctgaaaatggagttttagaggaaaagtcaacatctaactagtgaggaaaagtgcctaatacaattagaatctccctcactctatagttgcccagttgaaaggataaggaggaggggtggcttttatggacttccatgagagaaggaaagaaatatttcaggtaagcttctcagggctggccctttttgggatttggatgagaaattggaagtactaactactttctagcatatctttaagaaaattgattgttatttactcccagatcctcttgcagacccagaattatcaggaacatagctctgtgattcatgagtgtccccatactgatgaattggagcatccatatggaaagcaaaggcagaattatcccagctgtattattttgatcttttggatgcaggtgccttaatgaagctctcaaaatattttaggagctgctcagggagtgttgggtggaactgtttggactacattgttttctcttagattatgtgatttttgttgggcactggcaaaaggtgtgtgtgtgaatgtgtgcatgtgtgtgaatgttgtgtgtgtgtgtgtgtgtgtgtgtgtgtgtgtgtgtgtgtgtgtttgcagacatgcaaaactgcagctgaaataataccttagatttctaggtaagtctttccacatttcaataatgggtaagagtagaaccagggccgggtatcaattattgcttgctgtttgcaaccaggcataaaatcactttctcaaatcatccaccgttcctattaaatttatgccggaaactctccttctgtgagtataactcctgcagttcctatagcagataagatataagaaagtgcctcctagtgctcctccgcccgcttgtttgctaaaattccctttctctctaagtccaccattttcaagatttgtagatagtgtattagttaagacagctttgtcgatctggccagatgttttttctcctttgtccaaaggccagagaccatcccaggaagagtggtgggtggtttatacactggaaatgttgcgtttatgctttttaaaaacacacgttaacttcagaggaaggatgggcaaatctggtctagctgggtgaaacccttattttcccagagatgccttaacctttgttggttttggctttagggttcagagtcacttttgttcccttctccattctggagagggacttcccctacatagagccctgatttttgtggctgtggggattggaggtagcattcaaagatcagatgtgcttttcctcactttggagatgaacactctgggttttacagcattaacctgcctaaccttcatggtgagaaatacaccatctctcttctagtcatgctgtgcatgccgcttactctgttggggtctatataaatttgttgaactcttacctacattccaaagaagtttcaaggaaccataaatatatgtatacatatacatatataaaatatatatattaaaataaaattatcaggaatactgcctcagttattgaacttttttttttaagaatactttttttttaagctgagaagtatagggatgaaaaagatgttatattgtgtttgactattttccaacttgtattttcatataatttatattttttaaaagctgaaaatttagaagcaagatgaaaaaaaggaaaagcaggtgctttttaaaaatcagaactgaggtagcttagagatgtagcgatgtaagtgtcgatgtttttttaaaaaaaaatgcaaaaaaattcttatggcggagttttttgtttgtttattttagtagctgatgctggcacatcattttgctggagagttttttatatactgtagcctgatttcatattgtattttaaactgtgtgaaattaaaaacaaagaatttcattcataatgct

SEQ ID NO: 268 - protein, 485 aa, Homo Sapiens
MSYFVDSAGSSPVPYSAPRPAVVRQGPSNTYEDPRMNCGFQSNYHQQRPCYPFWDEMATQEVPTGLEHCVSDMECADVPLLTPSSKEMMSQALKATFSGFTKEQQRLGIPKDPRQWTETHVRDWVMWAVNEFSLKGVDFQKFCMNGAALCALGKDCFLELAPDFVGDILWEHLEILQKEDVKPYQVNGVNPAYPESRYTSDYFISYGIEHAQCVPPSEFSEPSFITESYQTLHPISSEELLSLKYENDYPSVILRDPLQTDTLQNDYFAIKQEVVTPDNMCMGRTSRGKLGGQDSFESIESYDSCDRLTQSWSSQSSFNSLQRVPSYDSFDSEDYPAALPNHKPKGTFKDYVRDRADLNKDKPVIPAAALAGYTGSGPIQLWQFLLELLTDKSCQSFISWTGDGWEFKLSDPDEVARRWGKRKNKPKMNYEKLSRGLRYYYDKNIIHKTAGKRYVYRFVCDLQSLLGYTPEELHAMLDVKPDADE

SEQ ID NO: 269 - DNA, 1502 bp, Homo Sapiens
atcacaatcagaagacaggagctgcagaacagaacactttctcatgtccagggtcagattacaagagcactcaagactttactgacgaaaactcaggaaatcctctatcacaaagaggtttggcaactaaactaagacattaaaaggaaaataccagatgccactctgcaggttgcaataactactacttactggatacattcaaaccctccagaatcaacagttatcaggtaaccaacaagaaatgcaagccgtcgacaacctcacctctgcgcctggtaacaccagtctgtgcaccagagactacaaaatcacccaggtcctcttcccactgctctacactgtcctgttttttgttggacttatcacaaatggcctggcgatgaggattttctttcaaatccggagtaaatcaaactttattatttttcttaagaacacagtcatttctgatcttctcatgattctgacttttccattcaaaattcttagtgatgccaaactgggaacaggaccactgagaacttttgtgtgtcaagttacctccgtcatattttatttcacaatgtatatcagtatttcattcctgggactgataactatcgatcgctaccagaagaccaccaggccatttaaaacatccaaccccaaaaatctcttgggggctaagattctctctgttgtcatctgggcattcatgttcttactctctttgcctaacatgattctgaccaacaggcagccgagagacaagaatgtgaagaaatgctctttccttaaatcagagttcggtctagtctggcatgaaatagtaaattacatctgtcaagtcattttctggattaatttcttaattgttattgtatgttatacactcattacaaaagaactgtaccggtcatacgtaagaacgaggggtgtaggtaaagtccccaggaaaaaggtgaacgtcaaagttttcattatcattgctgtattctttatttgttttgttcctttccattttgcccgaattccttacaccctgagccaaacccgggatgtctttgactgcactgctgaaaatactctgttctatgtgaaagagagcactctgtggttaacttccttaaatgcatgcctggatccgttcatctattttttcctttgcaagtccttcagaaattccttgataagtatgctgaagtgccccaattctgcaacatctctgtcccaggacaataggaaaaaagaacaggatggtggtgacccaaatgaagagactccaatgtaaacaaattaactaaggaaatatttcaatctctttgtgttcagaactcgttaaagcaaagcgctaagtaaaaatattaactgacgaagaagcaactaagttaataataatgactctaaagaaacagaagattacaaaagcaattttcatttacctttccagtatgaaaagctatcttaaaatatagaaaactaatctaaactgtagctgtattagcagcaaaacaaacgac

SEQ ID NO: 270 - protein, 342 aa, Homo Sapiens
MQAVDNLTSAPGNTSLCTRDYKITQVLFPLLYTVLFFVGLITNGLAMRIFFQIRSKSNFIIFLKNTVISDLLMILTFPFKILSDAKLGTGPLRTFVCQVTSVIFYFTMYISISFLGLITIDRYQKTTRPFKTSNPKNLLGAKILSVVIWAFMFLLSLPNMILTNRQPRDKNVKKCSFLKSEFGLVWHEIVNYICQVIFWINFLIVIVCYTLITKELYRSYVRTRGVGKVPRKKVNVKVFIIIAVFFICFVPFHFARIPYTLSQTRDVFDCTAENTLFYVKESTLWLTSLNACLDPFIYFFLCKSFRNSLISMLKCPNSATSLSQDNRKKEQDGGDPNEETPM

SEQ ID NO: 271 - DNA, 3647 bp, Homo Sapiens
aaaagagacagggctgctttaagagagaaacaggaagttgtaactagaagccatctgaatactaagccagggcagaatgcttgtgaagtagcaactaaagtggcagtgtttcttctgaaattctcaggcagtcagactgtcttaggcaaatcttgataaaatagcctttatccaggtttttatctaaggaatcccaagaagactggggaatggagagacagtcaagggttatgtcagaaaaggatgagtatcagtttcaacatcagggagcggtggagctgcttgtcttcaattttttgctcatccttaccattttgacaatctggttatttaaaaatcatcgattccgcttcttgcatgaaactggaggagcaatggtgtatggccttataatgggactaattttacgatatgctacagcaccaactgatattgaaagtggaactgtctatgactgtgtaaaactaactttcagtccatcaactctgctggttaatatcactgaccaagtttatgaatataaatacaaaagagaaataagtcagcacaacatcaatcctcatcaaggaaatgctatacttgaaaagatgacatttgatccagaaatcttcttcaatgttttactgccaccaattatatttcatgcaggatatagtctaaagaagagacacttttttcaaaacttaggatctattttaacgtatgccttcttgggaactgccatctcctgcatcgtcatagggttaattatgtatggttttgtgaaggctatgatacatgctggccagctgaaaaatggagactttcatttcactgactgtttattttttggttcactgatgtctgctacagatccagtgacagtgctggccattttccatgaactgcacgtcgaccctgacctgtacacactcttgtttggagagagtgtgttgaatgatgcagtggccatagtccttacatattctatatccatttacagtcccaaggagaatccaaatgcatttgatgccgcagcattcttccagtctgtggggaatttcctgggaatcttcgctggctcatttgcaatggggtctgcgtatgccatcatcacagcactgttgaccaaatttaccaagctgtgtgagttcccgatgctggaaaccggcctgtttttcctgctttcttggagtgccttcctgtctgccgaggctgccggcctaacagggatagttgctgttctcttctgtggagtcacacaagcacattatacctacaacaatctgtcttcggattccaaaataagaactaaacagttgtttgaatttatgaactttttggcggagaacgtcatcttctgttacatgggcctggcactgttcacgttccagaatcatatctttaatgctctttttatacttggagcctttctagcaatttttgttgccagagcctgcaacatatatcccctctccttcctcctgaatctaggccgaaaacagaagatcccctggaactttcagcacatgatgatgttttcaggtttgcgaggagcgatcgcatttgccttagctattcggaacacagaatctcagcccaaacaaatgatgtttaccactacgctgctcctcgtgttcttcactgtctgggtatttggaggaggaacaacccccatgttgacttggcttcagatcagagttggcgtggacctggatgaaaatctgaaggaggacccctcctcacaacaccaggaagcaaataacttggataaaaacatgacgaaagcagagagtgctcggctcttcagaatgtggtatagctttgaccacaagtatctgaaaccaattttaacccactctggtcctccgctgactacaacattacctgaatggtgtggtccgatttccaggctgcttaccagtcctcaagcctatggggaacagctaaaagaggatgatgtggaatgcattgtaaaccaggatgaactagccataaattaccaggagcaagcctcctcaccctgcagtcctcctgcaaggctaggtctggaccagaaagcttcaccccagacgccaggcaaggaaaacatttatgagggagacctcggcctgggaggctatgaactcaagcttgagcaaactttgggtcaatcccagttgaattaattggcatgaagagtacagatgtaatcacaagtaatgcaagactcactgaggaatacaagccaagctgatgaggcagtacaggggagaggctggaaaacatattaagagcataaattggagagaatcaaagccttgtcacatggatcctctggtgcctgaagaaatgagattttattatccctctctattatgcaaatgaatttagttttttgacagcagccattctgattactggattggctggggtggggatggaggtatcaggagtctagctgctggaggatgggacagctgtgctgggtcttcagggcatttctgctgcgaatgcggctctccaggcccttcacttctattctggattttattccctccattaaggagagtttaaaaataaaagaaagcttctgagagtaaacattttgctcctaagctgaagggaatgcccagctatttagtaagtgataagtttcttattttgaggacttgactcccatttgctctcagtgaccccagggcagagcccagagaagtgttccgtacccactgctgatggtttcccagagcccacactgagttgaagaacctattgttcttcttggcatccttcttatgctacttctcccatcgctcaaaggggttgcctatggctgggtgtgccctgccctaaatgcagcaccactttcaagcttagtaggaccattccaagaaaaccaggtttcttctccccataccacgttgtgcctgaagaacaagccttcccgtccttgcctgcatgtgagtcacttcttggctgtgcagcaggtccccccctccccgcgatatgctggagggtaggattctgcagcctgtgttgctctctacctggcagcagactgtgcaggagccccaacctgtcctccaattccagcattcacagctgatgagcagtgcaggagcagggcgagaggaacagagccaatgatgtgtgggttacactgaggagccaaggacagggcctcaggtctcccccttacaaggcgtggctcatggcctgcattccagagaccaacatgatagcttttaattcagctgcatgacctgtgccttttaagccataaagatacctcaagcctagcacctcttgaaatccagatgttcatattagactcgaaaaaataggctccaggcctaggtgcccaggctatgatgagtctgcttttgaaggaggtagggaatgacatcttccttggacccaaagcttaaaagtaatgtatgctttgctgaccactgtttgttaggccttaaacaacattcactgtggtggtatcaggcacactgctatgtgcatcaattatttttttgctttccaaacagaatctctggggcacaagttttacactcaagctaagtataactttgtcatttcaggtaaatatgacaagtggtggagcatgaagttttctaatttgacttaatcctaataaatttttgttacaaagtaaaaaaaaaaaaaaaaaaaaa

SEQ ID NO: 272 - protein, 645 aa, Homo Sapiens
MERQSRVMSEKDEYQFQHQGAVELLVFNFLLILTILTIWLFKNHRFRFLHETGGAMVYGLIMGLILRYATAPTDIESGTVYDCVKLTFSPSTLLVNITDQVYEYKYKREISQHNINPHQGNAILEKMTFDPEIFFNVLLPPIIFHAGYSLKKRHFFQNLGSILTYAFLGTAISCIVIGLIMYGFVKAMIHAGQLKNGDFHFTDCLFFGSLMSATDPVTVLAIFHELHVDPDLYTLLFGESVLNDAVAIVLTYSISIYSPKENPNAFDAAAFFQSVGNFLGIFAGSFAMGSAYAIITALLTKFTKLCEFPMLETGLFFLLSWSAFLSAEAAGLTGIVAVLFCGVTQAHYTYNNLSSDSKIRTKQLFEFMNFLAENVIFCYMGLALFTFQNHIFNALFILGAFLAIFVARACNIYPLSFLLNLGRKQKIPWNFQHMMMFSGLRGAIAFALAIRNTESQPKQMMFTTTLLLVFFTVWVFGGGTTPMLTWLQIRVGVDLDENLKEDPSSQHQEANNLDKNMTKAESARLFRMWYSFDHKYLKPILTHSGPPLTTTLPEWCGPISRLLTSPQAYGEQLKEDDVECIVNQDELAINYQEQASSPCSPPARLGLDQKASPQTPGKENIYEGDLGLGGYELKLEQTLGQSQLN

SEQ ID NO: 273 - DNA, 2725 bp, Homo Sapiens
agaatgctgagcagtcaacagcatttcttgttccaagatcacccttctgagtacctctctggctgccaaattgccagggccttcacagtttgattccatttctcagctccaagcattaggtaaacccaccaagcaatcctagcctgtgatggcgtttgacgtcagctgcttcttttgggtggtgctgttttctgccggctgtaaagtcatcacctcctgggatcagatgtgcattgagaaagaagccaacaaaacatataactgtgaaaatttaggtctcagtgaaatccctgacactctaccaaacacaacagaatttttggaattcagctttaattttttgcctacaattcacaatagaaccttcagcagactcatgaatcttacctttttggatttaactaggtgccagattaactggatacatgaagacacttttcaaagccatcatcaattaagcacacttgtgttaactggaaatcccctgatattcatggcagaaacatcgcttaatgggcccaagtcactgaagcatcttttcttaatccaaacgggaatatccaatctcgagtttattccagtgcacaatctggaaaacttggaaagcttgtatcttggaagcaaccatatttcctccattaagttccccaaagacttcccagcacggaatctgaaagtactggattttcagaataatgctatacactacatctctagagaagacatgaggtctctggagcaggccatcaacctaagcctgaacttcaatggcaataatgttaaaggtattgagcttggggcttttgattcaacgatcttccaaagtttgaactttggaggaactccaaatttgtctgttatattcaatggtctgcagaactctactactcagtctctctggctgggaacatttgaggacattgatgacgaagatattagttcagccatgctcaagggactctgtgaaatgtctgttgagagcctcaacctgcaggaacaccgcttctctgacatctcatccaccacatttcagtgcttcacccaactccaagaattggatctgacagcaactcacttgaaagggttaccctctgggatgaagggtctgaacttgctcaagaaattagttctcagtgtaaatcatttcgatcaattgtgtcaaatcagtgctgccaatttcccctcccttacacacctctacatcagaggcaacgtgaagaaacttcaccttggtgttggctgcttggagaaactaggaaaccttcagacacttgatttaagccataatgacatagaggcttctgactgctgcagtctgcaactcaaaaacctgtcccacttgcaaaccttaaacctgagccacaatgagcctcttggtctccagagtcaggcattcaaagaatgtcctcagctagaactcctcgatttggcatttacccgcttacacattaatgctccacaaagtcccttccaaaacctccatttccttcaggttctgaatctcacttactgcttccttgataccagcaatcagcatcttctagcaggcctaccagttctccggcatctcaacttaaaagggaatcactttcaagatgggactatcacgaagaccaacctacttcagaccgtgggcagcttggaggttctgattttgtcctcttgtggtctcctctctatagaccagcaagcattccacagcttgggaaaaatgagccatgtagacttaagccacaacagcctgacatgcgacagcattgattctcttagccatcttaagggaatctacctcaatctggctgccaacagcattaacatcatctcaccccgtctcctccctatcttgtcccagcagagcaccattaatttaagtcataaccccctggactgcacttgctcgaatattcatttcttaacatggtacaaagaaaacctgcacaaacttgaaggctcggaggagaccacgtgtgcaaacccgccatctctaaggggagttaagctatctgatgtcaagctttcctgtgggattacagccataggcattttctttctcatagtatttctattattgttggctattctgctattttttgcagttaaataccttctcaggtggaaataccaacacatttagtgctgaaggtttccagagaaagcaaataagtgtgcttagcaaaattgctctaagtgaaagaactgtcatctgctggtgaccagaccagacttttcagattgcttcctggaactgggcagggactcactgtgcttttctgagcttcttactcctgtgagtcccagagctaaagaaccttctaggcaagtacaccgaatgactcagtccagagggtcagatgctgctgtgagaggcacagagccctttccgcatgtggaagagtgggaggaagcagagggagggactgggcagggactgccggccccggagtctcccacagggaggccattccccttctactcaccgacatccctcccagcaccacacaccccgcccctgaaaggagatcatcagcccccacaatttgtcagagctgaagccagcccactacccacccccactacagcattgtgcttgggtctgggttctcagtaatgtagccatttgagaaacttacttggggacaaagtctcaatccttattttaaatgaaaaaagaaaagaaaagcataataaatttaaaagaaaaggctgagaaatgaaaaaaaaaaaa

SEQ ID NO: 274 - protein, 661 aa, Homo Sapiens
MAFDVSCFFWVVLFSAGCKVITSWDQMCIEKEANKTYNCENLGLSEIPDTLPNTTEFLEFSFNFLPTIHNRTFSRLMNLTFLDLTRCQINWIHEDTFQSHHQLSTLVLTGNPLIFMAETSLNGPKSLKHLFLIQTGISNLEFIPVHNLENLESLYLGSNHISSIKFPKDFPARNLKVLDFQNNAIHYISREDMRSLEQAINLSLNFNGNNVKGIELGAFDSTIFQSLNFGGTPNLSVIFNGLQNSTTQSLWLGTFEDIDDEDISSAMLKGLCEMSVESLNLQEHRFSDISSTTFQCFTQLQELDLTATHLKGLPSGMKGLNLLKKLVLSVNHFDQLCQISAANFPSLTHLYIRGNVKKLHLGVGCLEKLGNLQTLDLSHNDIEASDCCSLQLKNLSHLQTLNLSHNEPLGLQSQAFKECPQLELLDLAFTRLHINAPQSPFQNLHFLQVLNLTYCFLDTSNQHLLAGLPVLRHLNLKGNHFQDGTITKTNLLQTVGSLEVLILSSCGLLSIDQQAFHSLGKMSHVDLSHNSLTCDSIDSLSHLKGIYLNLAANSINIISPRLLPILSQQSTINLSHNPLDCTCSNIHFLTWYKENLHKLEGSEETTCANPPSLRGVKLSDVKLSCGITAIGIFFLIVFLLLLAILLFFAVKYLLRWKYQHI

SEQ ID NO: 275 - DNA, 7580 bp, Homo Sapiens; identical to SEQ ID NO: 35

SEQ ID NO: 276 - protein, 1200 aa, Homo Sapiens; identical to SEQ ID NO: 36

SEQ ID NO: 277 - DNA, 2592 bp, Homo Sapiens
accactttgtctaaggcagttgaggaagggaagtagatataatggagcttagtggcagagcagctggaatcctgagagaagagaataactttagttcagagcaggtggggaaatgagagattgagtaggaggaccaaggttgagggaagcagatcttcttagttgctgtcagcggctgatggggaagattgttggtagaaggaagtcagaatataggtacagagggataagtttgctaagaacagagatcagcaaacagcttttctgagagaaagaaacatctgcaaatgacatgctgtttctgcagtttctgctgctagctcttcttctcccaggtggtgacaatgcagacgcatcccaggaacacgtctccttccatgtcatccagatcttctcatttgtcaaccaatcctgggcacgaggtcagggctcaggatggctggacgagttgcagactcatggctgggacagtgaatcaggcacaataattttcctgcataactggtccaagggcaacttcagcaatgaagagttgtcagacctagagttgttatttcgtttctacctctttggattaactcgggagattcaagaccatgcaagtcaagattactcgaaatatccctttgaagtacaggtgaaagcgggctgtgagctgcattctggaaagagcccagaaggcttctttcaggtagctttcaacggattagatttactgagtttccagaatacaacatgggtgccatctccaggctgtggaagtttggcccaaagtgtctgtcatctactcaatcatcagtatgaaggcgtcacagaaacagtgtataatctcataagaagcacttgcccccgatttctcttgggtctcctggatgcagggaagatgtatgtacacaggcaagtgaggccagaagcctggctgtccagtcgccccagccttgggtctggccagctgttgctggtttgtcatgcctccggcttctacccaaagcctgtttgggtgacatggatgcggaatgaacaggagcaactgggcactaaacatggtgatattcttcctaatgctgatgggacatggtatcttcaggtgatcctggaggtggcatctgaggagcctgctggcctgtcttgtcgagtgagacacagcagtctaggaggccaggacatcatcctctactggggacaccacttttccatgaattggattgccttggtagtgatagtgcccttggtgattctaatagtccttgtgttatggtttaagaagcactgctcatatcaggacatcctgtgagactcttccccctgactcccccattgtgttaagaacccagcaacccaggagcctagtacaatatagtgatgccatcccgtcgactctccatttaaattgtttctctttctgcataataaacatttgttaataaaaaccaaattctaatttggaatgtttttcttggaatctccactttttatatagcactcaaccttcaaagcccatttctgatgtcatttcctccaacgatcttccttgacccatactgaacccagagagcccctcaactgttatgtgcatgcaacacttcctaccctgtgttgcagctacttgagtctttcatttcacatttttaagcttttaggaggcaaggatcatgataaatgtgcctttcctgcatatgataggctcagtgaaacacaaaacaaaacatcatatctaagttggattaactgtcatgttgacaatttttctcattatattccttcccaatgttgttgtagcattggaaatattcatgcttctctttttgtttaaatgcttcatacctagcagataaattccactctcctttagctccctcattttctccttaaacatttaaggaaaagtgcagccttgtgccttgatacacttattttctaaacacagagaattacaaatgcaaatagacagagagtgtgcaagttacatgtgatgatcagtggtgcagatatgtcacagaatacttaagaaaaggaacaagagatttggtcctcagggttggagtgggatcaaggcaaccgttgtgctgtatatggaagacaaatttcctaaaggactgtgttatctgagatagccttggctaaactttagtccctttaggtttcattcactaattcaactaatattttttgggtactgagttgagacaggcacatacagcttctaaactggtggtggataaaacaaatgagattgtgtccactctcctgaagttgcaatgtttgcttcctcaatctgtccatgtttcttttctattgttttcatgtttttatttatttcaaaaaattttaaatagattttattgatgtataatttatagtaaaatttgaatctttaagtgtacagttctatttattttgataattatataagcccatgtaaacaaaatcacaatcaagatattaaatgtcataacccctcatacctgtttgtagtcaagcacaccaacaacctggcattcttgcaactactgatatactttatgtcacttaagcttaaacttgtattttctatgattttattaagatggaaataaacatatctacttggta

SEQ ID NO: 278 - protein, 333 aa, Homo Sapiens
MLFLQFLLLALLLPGGDNADASQEHVSFHVIQIFSFVNQSWARGQGSGWLDELQTHGWDSESGTIIFLHNWSKGNFSNEELSDLELLFRFYLFGLTREIQDHASQDYSKYPFEVQVKAGCELHSGKSPEGFFQVAFNGLDLLSFQNTTWVPSPGCGSLAQSVCHLLNHQYEGVTETVYNLIRSTCPRFLLGLLDAGKMYVHRQVRPEAWLSSRPSLGSGQLLLVCHASGFYPKPVWVTWMRNEQEQLGTKHGDILPNADGTWYLQVILEVASEEPAGLSCRVRHSSLGGQDIILYWGHHFSMNWIALVVIVPLVILIVLVLWFKKHCSYQDIL

SEQ ID NO: 279 - DNA, 4140 bp, Homo Sapiens
gaagccagaggctgggggagctgctggagcctcgcgaagccgcggccggcgccctgcgccgtcgccgccgcctgctagtttcctccgggttctcagccccgggtactgaggcttcggtctataaatagcaggttacagctcctcctgggcgcgcacacgctcacacgctcgcaagcgaacgcaggaaagtcaggctaaaagtgtctgctgctgctgccgccccccactccgcctccgggagagaatacaaagaaatggtgttacctggcaagaggtcttctgtcttttatgaaaaattagacaaaggctttacaggaggcatagtactggaaatctgctcctgatgaggtctcagaaagcttccactcgtggtggaaggcaaaggaggagcaggcacatcacatgagccttgaaaccagcgaaacaataatcaaagagcagttctgtcaaagaaaacaacataaatcaggtacagaatttcagagtgggatatcagatctttagtgtgaagatacatctacattaaaccaggaatcactagaactgacatttggacaagaaaatttggaaaattttaaaactgtgaaggttgatcatggaaattaaagaggaaggggcatcagaagaagggcagcactttcttcctacagcccaggccaatgatcccggggactgtcagttcacaagtatccagaagactccaaatgaaccgcagttggaattcatccttgcatgcaaggatctcgtggctcctgtccgtgatcgtaaactgaatacactggtgcagatctccgtaatccaccccgtggagcagagtctgacaagatactccagcaccgaaattgtggagggaacaagggacccactgtttttgactggtgtcacattcccatctgagtatcccatctatgaggagaccaaaataaaactaacagtctatgatgtcaaggataagtctcatgacaccgttcgaaccagtgtcctaccagaacataaggatcccccgccagaagttgggcgaagtttcttgggctatgccagttttaaagtgggagagctgctgaagtcaaaggagcaattgctggtcctgagcctgagaacttcagatggtggcaaagtggttggcaccatagaagtcagtgtcgtgaagatgggggagattgaggatggggaagccgaccacatcaccacagatgtacagggacaaaagtgtgccctggtatgtgaatgtacagccccggaaagtgtgagcggaaaagataacttaccttttttgaattcagtgttaaagaacccagtatgtaaattatatagatttcccacatctgacaataagtggatgcgaattcgagagcagatgtcagagagcattctttcctttcatattcctaaggaattgatttcccttcacattaaagaagatttgtgcagaaaccaggagataaaagaacttggtgagctttctccacattgggacaatctgcgaaaaaatgtccttactcactgtgatcaaatggtgaatatgtaccaagacattctgacagaacttagcaaggaaacagggtcctctttcaaatcaagcagcagcaaaggagagaaaacattagaatttgttccaataaatctacatctgcaaagaatgcaggtacacagccctcacttgaaagatgctctctacgatgtcatcactgtgggagccccagctgcccattttcagggatttaagaatggtggtcttcggaagctactccatagatttgaaacagaaagaagaaataccggataccagtttatttactattcacctgaaaacacagccaaagcaaaggaagttctcagcaacatcaatcaactacaacctcttatagcaacccatgcagacctactgcttaattctgcaagccagcattctccagacagcttgaagaattctttaaagatgctttcagaaaaaacagagctttttgtacatgccttcaaggatcaacttgtcaggagtgctcttttagcactctacactgcaaggccaggaggcattcttaagaagccaccctctcctaagagcagcacagaggagagcagtccccaagaccaacccccagtgatgagagggcaggactccataccacatcattcagactatgatgaggaagagtgggacagggtgtgggccaatgtggggaagagcctgaactgcattattgctatggtggacaaactgattgaaagagatggtggcagtgaaggcagtggcggcaacaatgatggagaaaaggaaccttcattaacagatgccattccctctcacccaagagaggactggtatgaacagttgtatcccctcatccttaccctgaaggactgcatgggagaagtggtgaaccgagccaagcagtccctgacatttgtgctccttcaggaacttgcgtacagcttgccccagtgtctgatgctgacgctaagaagagacatcgtcttcagccaagcacttgctggattggtttgtggttttatcatcaaattacagacaagtctgtatgacccaggcttcctacagcagcttcacacagtggggttgatagtacaatatgaaggactgctaagtacatacagcgatgaaattggaatgctagaggacatggccgttggcatttccgatttaaagaaagttgcatttaaaataattgaagccaaatccaatgatgtgttgccagttataacaggaagacgagaacattacgtggtagaggtcaagcttccagccagaatgtttgagtcactacctctacagattaaagaaggacagttgcttcatgtgtatccagtactttttaatgttggaatcaatgaacagcaaactctggctgaaaggtttggagatgtctctttgcaagaaagtattaatcaggaaaacttcgaacttctacaagaatattacaagatatttatggaaaagatgcctcctgattatatttcacattttcaggaacaaaatgatttaaaagcattgctagaaaatctccttcaaaatatccaatccaaaaaaagaaagaatgtagaaattatgtggctggctgcaacgatttgccgcaaactgaatggtattcgtttcacctgttgtaaaagtgccaaagacaggacatcgatgtcagtgacacttgaacaatgctcaatcttgagagatgagcaccagttacacaaggacttctttatccgagcgctggattgcatgagaagagaaggatgccgcatagagaatgtactgaagaatatcaaatgcagaaagtatgctttcaacatgctacagctgatggctttccccaagtactacagacctccagaggggacttatggaaaagctgacacctaagtttaccaacatgttaataaacaggaacacaaatacatttcagttggataatcttcaccttggtcttttttgtttgtttttattgtcatgaatttgtggtgggggagatgatcacagatgtttcccaaaatctaggaactacttcaattcatcatcagcatattgctctgaaagaaatccattttaaaaaatcttacatgattcagtactgtcatttctagttctaagcttctatgtgttgagcctagctgattgagattggttcacaaagtgtaaatttcattcatgagtatttaaatgtttctgaggaaacatggatcatttcaataggactaggggtgattcacagagcaccactctccaaccaaatggaagagaggagagggggaaaaggaacatattttttttgtgatacaacttaatagcctatgagaacacagtcaacctgagaatcaatgtaagggatttaaaaaaaatgtgtagccactcaattaggtagagttaactcatgatctggaatactgaggcagtttgcaggtatgttccacaatgatctctatcatccagtcaaggtgtgactcctcccttgcaacaggcatatgcatggagtgagtaaagtggtcaacagacctttcaaaaccatggcatcttttcagaactctgacttgggttgtgtgatctagctgtgaatgtagcaatatagaacgtttaatagaatgataagcaaaacactgcaatgatctaaaattacaaaaaaaaaaaaaaaaaaa

SEQ ID NO: 280 - protein, 924 aa, Homo Sapiens
MEIKEEGASEEGQHFLPTAQANDPGDCQFTSIQKTPNEPQLEFILACKDLVAPVRDRKLNTLVQISVIHPVEQSLTRYSSTEIVEGTRDPLFLTGVTFPSEYPIYEETKIKLTVYDVKDKSHDTVRTSVLPEHKDPPPEVGRSFLGYASFKVGELLKSKEQLLVLSLRTSDGGKVVGTIEVSVVKMGEIEDGEADHITTDVQGQKCALVCECTAPESVSGKDNLPFLNSVLKNPVCKLYRFPTSDNKWMRIREQMSESILSFHIPKELISLHIKEDLCRNQEIKELGELSPHWDNLRKNVLTHCDQMVNMYQDILTELSKETGSSFKSSSSKGEKTLEFVPINLHLQRMQVHSPHLKDALYDVITVGAPAAHFQGFKNGGLRKLLHRFETERRNTGYQFIYYSPENTAKAKEVLSNINQLQPLIATHADLLLNSASQHSPDSLKNSLKMLSEKTELFVHAFKDQLVRSALLALYTARPGGILKKPPSPKSSTEESSPQDQPPVMRGQDSIPHHSDYDEEEWDRVWANVGKSLNCIIAMVDKLIERDGGSEGSGGNNDGEKEPSLTDAIPSHPREDWYEQLYPLILTLKDCMGEVVNRAKQSLTFVLLQELAYSLPQCLMLTLRRDIVFSQALAGLVCGFIIKLQTSLYDPGFLQQLHTVGLIVQYEGLLSTYSDEIGMLEDMAVGISDLKKVAFKIIEAKSNDVLPVITGRREHYVVEVKLPARMFESLPLQIKEGQLLHVYPVLFNVGINEQQTLAERFGDVSLQESINQENFELLQEYYKIFMEKMPPDYISHFQEQNDLKALLENLLQNIQSKKRKNVEIMWLAATICRKLNGIRFTCCKSAKDRTSMSVTLEQCSILRDEHQLHKDFFIRALDCMRREGCRIENVLKNIKCRKYAFNMLQLMAFPKYYRPPEGTYGKADT

SEQ ID NO: 281 - DNA, 5069 bp, Homo Sapiens
gaggcggaggcggccccgggctcgggcggctgggatggagcagaagagcgcggagcaccggagggcacgcagctgacggagctgcgctgcgttcgcctcgtttgcctcgcgccctccactggagctgttcgcgcctcccggctcccaccgcagcccacccggcagaggagtcgctaccagcgcccagtgcgctctgtcagtccgcaaactccttgccgcccgccccgggctgggcaccaaataccaggctaccatggtctacaagactctcttcgctctttgcatcttaactgcaggatggagggtacagagtctgcctacatcagctcctttgtctgtttctcttccgacaaacattgtaccaccgaccaccatctggactagctctccacaaaacactgatgcagacactgcctccccatccaacggcactcacaacaactcggtgctcccagttacagcatcagccccaacatctctgcttcctaagaacatttccatagagtccagagaagaggagatcaccagcccaggttcgaattgggaaggcacaaacacagacccctcaccttctgggttctcgtcaacaagcggtggagtccacttaacaaccacgttggaggaacacagctcgggcactcctgaagcaggcgtggcagctacactgtcgcagtccgctgctgagcctcccacactcatctcccctcaagctccagcctcatcaccctcatccctatcaacctcaccacctgaggtcttttctgcctccgttactaccaaccatagctccactgtgaccagcacccaacccactggagctccaactgcaccagagtccccgacagaggagtccagctctgaccacacacccacttcacatgccacagctgagccagtaccccaggagaaaacacccccaacaactgtgtcaggcaaagtgatgtgtgagctcatagacatggagaccaccaccacctttcccagggtgatcatgcaggaagtagaacatgcattaagttcaggcagcatcgccgccattaccgtgacagtcattgccgtggtgctgctggtgtttggagttgcagcctacctaaaaatcaggcattcctcctatggaagacttttggacgaccatgactacgggtcctggggaaactacaacaaccctctgtacgatgactcctaacaatggaatatggcctgggatgaggattaactgttctttatttataagtgcttatccagtagaattaataagtacctgatgcgcattgaacgacaatcttaagccctgttttgttggtatggttgtttttgttttcctccctctcctctggctgctacaacttcccctttctggtacaagaagaaccattctttaaaggtgagtggaggctgatttgcagctgaagtgggccagccttgcaccagccaggccagaccaccatggtgaaggcttctttccccactgcaggacccactttgagaaggaccgaggaggaggatttgggttgttttgttaggggttactttcaggggaacatttcatttgtgttatttcttaaacttctatttaggaaattacattaagtattaatgaggggaaaggaaatgagctctacgaggatttcaccctgcatgggagagagcagggttttctcagattcctttttaatctctatttatctggttgtttctgacaggatgctgcctgcttggctctacaagctggaaagcagcttcttagctgcctaattaatgaaagatgaaaataggaagtgccctggagggggccagcaggtcacggggcagaatctctcaggttgctgtgggatctcagtgtgcccctacctgttctcccctccaggccacctgtctctgtaaaggatgtctgctctgttcaaaaggcagctgggatcccagcccacaagtgatcagcagagttgcatttccaaagaaaaaggctatgagatgagctgagttatagagagaaagggagaggcatgtacggtgtggggaagtggaagagaagctggcgggggagaaggaggctaacctgcactgagtacttcattaggacaagtgagaatcagctattgataatggccagagatatccacagcttggaggagcccagagaccgtttgctttatacccacacagcaactggtccactgctttactgtctgttggataatggctgtaaaatgtttaaaaacaaaacaaaacaaaaaagaggcactagtctatctgcaattactcaacgaggcattttcataggaaacagactatgattaatccatttattcttcccacacacttaccttactaagtctttgctttaataaatgagcaaccctgggtatagtcttaaaattctgcacaataaattttgagaaagaattgttcctctttgtaggtatctgtgtattgcaatcattctcaaccaggaggtgattttgccccctgactccaccccagggacattcaaaaatgtctggtgacagttttcattgtcatgacttgggggtgctactagaagccaggaatgctgccaaacattctaccatgcacagcacaacctacaacagcaaagaatcatccaccccaaaatatcagtagtgccgagattgagaaaccctgatttatcacaatgcccactgtgacagaacaagacactcacagattagtgatacgttttatttttaacaaaatgaaatgatgtgttaagtttttatttccaaagtgtttagtttattggctgatgggttgttcttggtatgcatggtgacctttttatttctgtgtgcttcctagagagctttatttcatggcgacaactctgtcttcttgtaacagctgatattagcaagcagcatcttatgtcctgatttcatatagtagaaaacaaacattgggtccgacttcaaaatgtgttgtattgtcctacagtgtcataaagaacctgaaaatgaacttttgtttctaaagttggaccttgctgccatgactgtttagtttacagaaacttgaccccggctcatcctgtctctggctgtggcccggcaaagcactgaaaacccctctggtctcagagacagtaggggcagtgccactttctacaacctgccaacccacacactggagtaattctgaaaaaaattattcctaaactctctaagtgtggacggagaatgagcaagccccagaagtattttacaaccagagtgggtaatgaggagggggcttactggaatcgtcatatctctgaatattgaaaacaacaactaaaaaagtggaccttctcagaaaaaaagggcagcaaatgaccaagggcgccccttctggccgtgcttggcttgagtaactgtctctctttccccacccccatcacagggctttcagtttggcaaaggaaaagcagataaaaacagaacattccatatgtttctttctccatcggccaaaaacattttgacacaatgtttgtgaaacacctttggagaggtgcacttctgaatgctgcctctgccgtaaatcctggggcaagggatcagcctcttcccaggaaccatcgccttctataaaccgtgaactcaagcaggcattttttttttcttaccgaaaggctgctattgtgcaagggcacataatgggtctgttgctcttattggcttccaaatgtgcatggcaaagagagagatgtgggcctagagcagatatattcagcaaggtgacagcttcccataacaattctaacacttcttatcttatgtgagaataaaatatttaagggttgaaccttattttgccaaatgtatcttttctgcttttgaattgggcagaagattttagcaactatattctacaaatgttacttataacacacacacacacatctgaaatatatgccgaaaattgacgtctttgacctcagggagagcacctgtccaggtctgcctaaaggaaatggctccagtgggtctaaacaaccacatcctatccatggataggtctagtcataacactttagagagaatgtcagagcaggagggaggcaagccgcctcttctcggccatcgactgcagatgatgaaagagcgggattcaactttgttttcttttcctgtggccccagtgaaacctcctgccctccctgcacgtctgtgtcttcatttctaaaatgggggtgatgctttcatattgacctcaccccatactacctcacagatgtgttgtgaggattaataaaattatgtctatggtattttcagtttctggagaaaaatacttatagacagtttaactattacatagatatataagtgatctcagtttcttgtttgctgtgatactaatgtgttgttttaacttattccataaaatgacagttgtgtcctagccacatcagacagctatctaagctctggactacccctttgtgcagctgaatcactgcagggttgaccatgcctggtgccacagccatggtttccatttctagatgaaaggatggcctaggacataggtctcaaagactcttggatcagaatcaggagattagggaaaacaggatggatacctgagcactaacagcagtagacgtagacctctgtcctttaccatctgaggtcttctggattctttgtggggttaattttgatttgatgtcatctgtttgcccttcatcttgcttgcaagtgtgcatggttcaatccctcacatccaggaaatgaattttgcaattgggccagatgctaatttgcacgttgattcaccttctttgcctttaagccttttttttcttttttttttttttggcaaatgaatgtaccatttcaactttgattttaatagtgctagttgatattggtaataatgctaaccaagagatcaatgccagatttttctcttggggtaagttagctgaagtcatttaaagatggaaaggtgggaaaattctttgatatttgatgtcattgtatccacatttgttgtaagacatattgcataccaattataattatatcaattaaagttgataaaagcttccaaaaaaaaaaaaaaaa

SEQ ID NO: 282 - protein, 310 aa, Homo Sapiens
MVYKTLFALCILTAGWRVQSLPTSAPLSVSLPTNIVPPTTIWTSSPQNTDADTASPSNGTHNNSVLPVTASAPTSLLPKNISIESREEEITSPGSNWEGTNTDPSPSGFSSTSGGVHLTTTLEEHSSGTPEAGVAATLSQSAAEPPTLISPQAPASSPSSLSTSPPEVFSASVTTNHSSTVTSTQPTGAPTAPESPTEESSSDHTPTSHATAEPVPQEKTPPTTVSGKVMCELIDMETTTTFPRVIMQEVEHALSSGSIAAITVTVIAVVLLVFGVAAYLKIRHSSYGRLLDDHDYGSWGNYNNPLYDDS

SEQ ID NO: 283 - DNA, 2094 bp, Homo Sapiens
gcggaggcagaggcggaggcggcacccaggggccggggcaggggaggccgggaccatcgcagtgacaatttattttcctgcagcagcggcagcagggacggttgctgcaggttcggggtcggccggcctgcgcgtgggcttgcgaggacgctgttcgtcccctgcgctggggtgtccgacagcgaggaggagaacgacgcacggagcccgcgcgactggaaccagcaaagctccatctgtcggcagaggagaagggggaggaggcacggccgaggcaaacgagcggacgcctcgtcgccgggtgccggtatcaccccgctgcaacgccttccagcaaaagccaccgcggcccgggttgcagcagccggacggatgccaaggccacacggcagccacgggggcagccgtcgcagtcgccgtcccacacgggctgcggacaccaagggttgctaatgaagtgattgagaagaaacagtgaacatcctcatttcacagataagacaacatggatcagccttttactgtgaattctctgaaaaagttagctgctatgcctgaccatacagatgtttccctaagcccagaagagcgagtccgtgccctaagcaagcttggttgtaatatcaccatcagtgaagacatcactccacgacgttactttaggtctggagtagagatggagaggatggcgtctgtgtatttggaagaaggaaatttggaaaatgcctttgttctttataataaatttataaccttatttgtagaaaagcttcctaaccatcgagattaccagcaatgtgcagtacctgaaaagcaggatattatgaagaaactgaaggagattgcattcccaaggacagatgaattgaaaaacgaccttttaaagaaatataacgtagaataccaagaatatttgcaaagcaaaaacaaatataaagctgaaattctcaaaaaattggagcatcagagattgatagaggcagaaaggaagcggattgctcagatgcgccagcagcagctagaatcggagcagtttctgtttttcgaagatcaactcaagaagcaagagttagcccgaggtcaaatgcgaagtcagcaaacctcagggctgtcagagcagattgatgggagcgctttgtcctgcttttccacacaccagaacaattccttgctgaatgtatttgcagatcaacctaataaaagtgatgcaaccaattatgctagccactctcctcctgtaaacagggccttaacgccagctgctactctaagtgctgttcagaatttagtggttgaaggactgcgatgtgtagttttgccagaagatctttgccacaaatttctgcaactggcagaatctaatacagtgagaggaatagaaacctgtggaatactctgtggaaaactgacacataatgaatttactattacccatgtaattgtgccaaagcagtctgcgggaccagactattgtgacatggagaatgtagaggaattattcaatgttcaggatcaacatgatctcctcactctaggatggatccatacacatcccactcaaactgcatttttatccagcgttgatcttcacactcactgttcctatcaactcatgttgccagaggccattgccattgtttgctcaccaaagcataaagacactggcatcttcaggctcaccaatgctggcatgcttgaggtttctgcttgtaaaaaaaagggctttcatccacacaccaaggagcccaggctgttcagtatatgcaaacatgtgttggtaaaagacataaaaataattgtgttggatctgaggtgatatgttctgaatgtaagcaccgtcaacatcagacacctactcatggacatgtggttgccggattttcttaagatgtttccagaaatgactgatattttatatttatacattttagatgacaaagcttgatatttattgctgttgcacattttaaagttttctttttgggttgctctgtgtcaagagaggttacatggtgttaaatcggtacctgataatgtacccaaatactatggccagataataaattgtgctgcaaacaacatgtcttgtattta

SEQ ID NO: 284 - protein, 436 aa, Homo Sapiens
MDQPFTVNSLKKLAAMPDHTDVSLSPEERVRALSKLGCNITISEDITPRRYFRSGVEMERMASVYLEEGNLENAFVLYNKFITLFVEKLPNHRDYQQCAVPEKQDIMKKLKEIAFPRTDELKNDLLKKYNVEYQEYLQSKNKYKAEILKKLEHQRLIEAERKRIAQMRQQQLESEQFLFFEDQLKKQELARGQMRSQQTSGLSEQIDGSALSCFSTHQNNSLLNVFADQPNKSDATNYASHSPPVNRALTPAATLSAVQNLVVEGLRCVVLPEDLCHKFLQLAESNTVRGIETCGILCGKLTHNEFTITHVIVPKQSAGPDYCDMENVEELFNVQDQHDLLTLGWIHTHPTQTAFLSSVDLHTHCSYQLMLPEAIAIVCSPKHKDTGIFRLTNAGMLEVSACKKKGFHPHTKEPRLFSICKHVLVKDIKIIVLDLR

SEQ ID NO: 285 - DNA, 3059 bp, Homo Sapiens
tcctctgcgtcccgccccgggagtggctgcgaggctaggcgagccgggaaagggggcgccgcccagccccgagccccgcgccccgtgccccgagcccggagccccctgcccgccgcggcaccatgcgcgccgagccggcgtgaccggctccgcccgcggccgccccgcagctagcccggcgctctcgccggccacacggagcggcgcccgggagctatgagccatgaagccgcccggcagcagctcgcggcagccgcccctggcgggctgcagccttgccggcgcttcctgcggcccccaacgcggccccgccggctcggtgcctgccagcgccccggcccgcacgccgccctgccgcctgcttctcgtccttctcctgctgcctccgctcgccgcctcgtcccggccccgcgcctggggggctgctgcgcccagcgctccgcattggaatgaaactgcagaaaaaaatttgggagtcctggcagatgaagacaatacattgcaacagaatagcagcagtaatatcagttacagcaatgcaatgcagaaagaaatcacactgccttcaagactcatatattacatcaaccaagactcggaaagcccttatcacgttcttgacacaaaggcaagacaccagcaaaaacataataaggctgtccatctggcccaggcaagcttccagattgaagccttcggctccaaattcattcttgacctcatactgaacaatggtttgttgtcttctgattatgtggagattcactacgaaaatgggaaaccacagtactctaagggtggagagcactgttactaccatggaagcatcagaggcgtcaaagactccaaggtggctctgtcaacctgcaatggacttcatggcatgtttgaagatgataccttcgtgtatatgatagagccactagagctggttcatgatgagaaaagcacaggtcgaccacatataatccagaaaaccttggcaggacagtattctaagcaaatgaagaatctcactatggaaagaggtgaccagtggccctttctctctgaattacagtggttgaaaagaaggaagagagcagtgaatccatcacgtggtatatttgaagaaatgaaatatttggaacttatgattgttaatgatcacaaaacgtataagaagcatcgctcttctcatgcacataccaacaactttgcaaagtccgtggtcaaccttgtggattctatttacaaggagcagctcaacaccagggttgtcctggtggctgtagagacctggactgagaaggatcagattgacatcaccaccaaccctgtgcagatgctccatgagttctcaaaataccggcagcgcattaagcagcatgctgatgctgtgcacctcatctcgcgggtgacatttcactataagagaagcagtctgagttactttggaggtgtctgttctcgcacaagaggagttggtgtgaatgagtatggtcttccaatggcagtggcacaagtattatcgcagagcctggctcaaaaccttggaatccaatgggaaccttctagcagaaagccaaaatgtgactgcacagaatcctggggtggctgcatcatggaggaaacaggggtgtcccattctcgaaaattttcaaagtgcagcattttggagtatagagactttttacagagaggaggtggagcctgccttttcaacaggccaacaaagctatttgagcccacggaatgtggaaatggatacgtggaagctggggaggagtgtgattgtggttttcatgtggaatgctatggattatgctgtaagaaatgttccctctccaacggggctcactgcagcgacgggccctgctgtaacaatacctcatgtctttttcagccacgagggtatgaatgccgggatgctgtgaacgagtgtgatattactgaatattgtactggagactctggtcagtgcccaccaaatcttcataagcaagacggatatgcatgcaatcaaaatcagggccgctgctacaatggcgagtgcaagaccagagacaaccagtgtcagtacatctggggaacaaaggctgcagggtctgacaagttctgctatgaaaagctgaatacagaaggcactgagaagggaaactgcgggaaggatggagaccggtggattcagtgcagcaaacatgatgtgttctgtggattcttactctgtaccaatcttactcgagctccacgtattggtcaacttcagggtgagatcattccaacttccttctaccatcaaggccgggtgattgactgcagtggtgcccatgtagttttagatgatgatacggatgtgggctatgtagaagatggaacgccatgtggcccgtctatgatgtgtttagatcggaagtgcctacaaattcaagccctaaatatgagcagctgtccactcgattccaagggtaaagtctgttcgggccatggggtgtgtagtaatgaagccacctgcatttgtgatttcacctgggcagggacagattgcagtatccgggatccagttaggaaccttcacccccccaaggatgaaggacccaagggtcctagtgccaccaatctcataataggctccatcgctggtgccatcctggtagcagctattgtccttgggggcacaggctggggatttaaaaatgtcaagaagagaaggttcgatcctactcagcaaggccccatctgaatcagctgcgctggatggacaccgccttgcactgttggattctgggtatgacatactcgcagcagtgttactggaactattaagtttgtaaacaaaacctttgggtggtaatgactacggagctaaagttggggtgacaaggatggggtaaaagaaaactgtctcttttggaaataatgtcaaagaacacctttcaccacctgtcagtaaacgggggagggggcaaaagaccatgctataaaaagaactgttccagaatcttttttttccctaatggacgaaggaacaacacacacacaaaaattaaatgcaataaaggaatcattaaaaaaaaaaa

SEQ ID NO: 286 - protein, 832 aa, Homo Sapiens
MKPPGSSSRQPPLAGCSLAGASCGPQRGPAGSVPASAPARTPPCRLLLVLLLLPPLAASSRPRAWGAAAPSAPHWNETAEKNLGVLADEDNTLQQNSSSNISYSNAMQKEITLPSRLIYYINQDSESPYHVLDTKARHQQKHNKAVHLAQASFQIEAFGSKFILDLILNNGLLSSDYVEIHYENGKPQYSKGGEHCYYHGSIRGVKDSKVALSTCNGLHGMFEDDTFVYMIEPLELVHDEKSTGRPHIIQKTLAGQYSKQMKNLTMERGDQWPFLSELQWLKRRKRAVNPSRGIFEEMKYLELMIVNDHKTYKKHRSSHAHTNNFAKSVVNLVDSIYKEQLNTRVVLVAVETWTEKDQIDITTNPVQMLHEFSKYRQRIKQHADAVHLISRVTFHYKRSSLSYFGGVCSRTRGVGVNEYGLPMAVAQVLSQSLAQNLGIQWEPSSRKPKCDCTESWGGCIMEETGVSHSRKFSKCSILEYRDFLQRGGGACLFNRPTKLFEPTECGNGYVEAGEECDCGFHVECYGLCCKKCSLSNGAHCSDGPCCNNTSCLFQPRGYECRDAVNECDITEYCTGDSGQCPPNLHKQDGYACNQNQGRCYNGECKTRDNQCQYIWGTKAAGSDKFCYEKLNTEGTEKGNCGKDGDRWIQCSKHDVFCGFLLCTNLTRAPRIGQLQGEIIPTSFYHQGRVIDCSGAHVVLDDDTDVGYVEDGTPCGPSMMCLDRKCLQIQALNMSSCPLDSKGKVCSGHGVCSNEATCICDFTWAGTDCSIRDPVRNLHPPKDEGPKGPSATNLIIGSIAGAILVAAIVLGGTGWGFKNVKKRRFDPTQQGPI

SEQ ID NO: 287 - DNA, 8475 bp, Homo Sapiens
gttgtgaccactgaacaaaacttgcccattgaaagcaaacccggaacagctggataatgtccaccccgagccgattcaagaaggacaaagagatcatagccgagtatgaaagtcaagtcaaagaaattcgagctcaactggtagaacaacaaaaatgcctggagcagcaaacggagatgcgagttcagcttctccaggatctgcaagatttcttccgaaaaaaagctgaaattgagacggaatattcccggaatctagagaagttagcagaaaggttcatggcaaaaacaagaagcactaaggatcatcaacaatacaagaaagaccagaacctgttgtctccagtgaactgctggtatttgctcctgaaccaagtaaggagagaaagcaaagaccatgcaaccttgagtgacatctatctgaacaatgtgattatgcggttcatgcagataagtgaggattctaccaggatgtttaaaaagagcaaagagattgcattccaacttcatgaggatttaatgaaggttcttaatgagctttatacggtgatgaaaacataccatatgtatcatgcagagagcatcagtgcagagagcaagctgaaagaggccgaaaaacaagaggaaaagcaaattgggagatctggtgatccagtcttccatattcgactagaggagagacatcaacggcgaagctctgtaaagaaaattgaaaaaatgaaagaaaaaagacaagcaaaatattcagaaaataagctaaaatcaattaaggcacggaacgaatatctcctaacacttgaagccaccaatgcctcagttttcaagtactatattcatgatctttctgatttaattgattgctgtgatcttggctaccatgcaagtctgaacagagccctaagaacatatctgtctgcggagtacaaccttgaaacctccagacatgagggcttagacattattgagaatgcagttgataatttagagcccaggagcgataagcagagattcatggagatgtaccctgctgcgttctgtccaccaatgaagtttgagtttcagtctcacatgggtgatgaggtgtgccaggtcagtgcccagcagccagtccaggcagagctcatgctcaggtaccaacagttgcagtcccgccttgccacgctcaaaatcgagaatgaagaggttaagaaaacgactgaagccaccttgcagacgatacaagatatggtcaccatcgaggactatgatgtttctgaatgcttccagcacagtcgttccacagaatcagtgaagtccactgtctctgaaacctacctgagtaaacccagcatcgccaagagaagagccaaccagcaggaaactgaacagttctacttcatgaaactcagagaatatttggaaggcagtaatctcatcacaaaacttcaagccaaacatgacttgctgcagaggaccctgggagaaggtcatagagctgaatatatgactacaaggcctccaaatgttccccctaagccccagaaacacaggaagtccaggccccgctcacagtataatactaagttgtttaatggggatttggaaacattcgtcaaggactcaggacaggttattcccctcattgtggaaagctgtattcggttcatcaatctctatggtcttcagcatcaggggattttcagagtgtctggttcccaggtggaagtcaatgatattaaaaattcatttgagagaggtgaaaatcctttggctgatgaccagagtaaccatgatattaactcagttgctggcgttctgaagctctatttccgtgggctggaaaaccccctctttcctaaggaaagatttaacgatctgatttcttgtatcagaatagataatctctatgagagggcgcttcacatccgcaaactcctcctgactttgcccaggtcggtccttatagtgatgaggtacctctttgccttcctcaatcatctatcacagtacagcgatgagaatatgatggacccttataacctggccatttgctttggcccaacattgatgcctgtcccagaaatacaggatcaagtgtcttgccaggcacatgtgaatgaaattatcaaaaccatcatcatccaccatgagactattttcccagatgctaaagagctggatggccctgtttatgagaaatgtatggctggagatgactattgcgacagcccatacagtgagcacggtacattggaggaagtggaccaagatgctggtacagagccccacacaagtgaagatgaatgtgagccaatagaagcaatagccaagtttgactatgttgggcggtctgccagagaactatccttcaagaagggtgcctccctgctgctgtatcaccgtgcatctgaggactggtgggaaggcaggcacaacgggattgacgggctggtgcctcaccagtatatagtggtgcaggatatggatgatacgttttcagacactctgagccaaaaagccgacagtgaggccagcagtgggccagtcacggaagacaagtcctcatccaaggacatgaactccccgacagaccgtcatcctgacggctatttagccaggcaacgaaaaagaggagagccaccccctccagtaaggcgtcctggcaggaccagtgatggccattgcccgctccaccctccacatgccctttctaactcctcagttgacctagggtccccaagccttgccagtcacccccggggcctgctgcagaaccgtggcctcaacaatgacagtcctgagcggaggcgcaggcctggccatggcagcctgaccaacatcagccggcacgactccctcaagaagatcgacagccctcccattagaaggtccacgtcatcagggcaatacacgggcttcaatgaccacaagccactggacccagagacaattgctcaggatattgaagaaacgatgaacacagctttgaatgaactccgagaactggagagacagagcacagcaaagcatgcccctgatgtggtgctggataccctggagcaagtgaaaaactctcccacccctgccacttccacggaatctctcagccctttgcacaacgttgccctcaggagctccgagcctcagattcgacgtagcacgagctcctccagtgacacaatgagtactttcaagcctatggtggcacccagaatgggcgtgcagctgaagcctccagcccttaggccaaaacctgctgttcttccaaaaacaaatcctaccataggacctgccccacctccccagggtccaacagacaagtcatgcacaatgtaaaaaccagccaagcaaggccataaagggaggtgacttaaaaaagaaaatggattagtgacaaaagtcactgatccataactttccttagttttgtgcttataactggagatcttttggcttttctatgttgtcgaatgtaatgtctgagactagctaaattaacacgggcatttgtattttgtaatttttttaaataactggacatatgtcattttaaggacaatagaaacacttagacttacttgaaaatccaatgctgcaccacttgtaatgaaggcaacaccgctctccacattgtacagagcttcaggtttaatgtagcccagctgagtcagaaaggttgtgacctgaaggcagaagaacccgaatgccacacctcattggagtatagccagtgttggtctgtggcacttgggctgaaaggtgataatggcattgcgtggtagctgacaatgagcaccttcggttccatgtggagcggggtttagctcatgcaaaagacttgcaattgtctccatgggacgatcccagtgggactgtcagcccacagctcgagtgggttggatgcttgcctctttcctaacagttatttccccgggtccagcttaaagactcgatggaaggaggtagaacctctgctgttactgcttgaacttaacctgggaaaggagaggaagacaccatctccaaagctattaatgtcactccttttgcgagcatgattaggccccggagatttccaagtccccccatctacacttacaaacgattagaagggtttaattttaaagactttctggttacactactccacgaactcctccaaagatccgttattcaataactgcctagaaaatgtttccatctcctctaaatccctgtgttctcctctgtggaaatgaaggcagcaagaagcacctgaggccttggttcatgcagtgttctcttttgactaaatcacctaggttcctttaaacatgctacaaagcccaggcatggtggtgcacacctgtactcccagctactcgggtggtttacacaggaggatggctttgggcctagtagttcgagtccagcctgggcagcatagtgtgagaccctgtctcttaaaaaaaaaaaaaatgctacaaagtcctgatgatcctaaatttgaaatcccaactgtcctctccatttgtctttgagccaaccctgaactggccctggtacctgagtaagagccatgcagggccatcagcagaacatggccttgtggttctcacccagttgtgtacctcacaaccacaacttctttttctttgtcccttttcccctttttggttttggttttgtatgtgggctctatgtaactcccatagtcagctgaactctcaattggagaccctctttctctggcatcctagcacacaggcaattttttaagcctatatttatgctacattttcccccatcttaagaaaatttgctttgatttccattctcctactagcagcagctgatatcacctgtagacctatgagcattttatctattctatcattgaagttactgataaagatttttgttgttgttgttgttgttgggagaaatggatttcccacaactaatccctctggcccaccattaatttccttcttggtttcatttcaaactggcagccaattgcacgcccatctaagagctacacagtgtagattttacttcatcagcccattggtgaatgcatcgtgcagaaaagaactgggatctgtactaaaatcaagatcattactttgatctctacctcagtttgccagtgtagtcattctattgcaggaagagattaaattgatgagatattgttactttcagagtcacactgctgattgcttgcctggggcctaatttcacaaatgaatagtgacttttttcccatgtatttctaggtatggtaaacttttaaacctccaaattttcagagccatactttttgcccattttgaaaaagaagcccaggacagcaccttgtctagcccctccccatttctcctgagcttttggggtccttcagcacccttggacaccgtggagatccagccaagactgagctttgaatagcactagcccttttaaacaatcctcacaaattccttaggaatttaaactttccaaaataatcccccacttttttttttttttttttttttttttgagttggagtcttgctctgtcgcccaggccagagtacagtggtgcaatctcggctccctgcaacctccatctcccgggttcaagcaattctcctgagtagctgggattacaggcgccaccaccacgcccagctaatttttgtatttttagtagagatggggtgtcaccatgttggccaggctggtctcaaactcctgacctcaggtgacccaccagcctcagcctcccaaagtgctgggattacagatgtgagccaccatgcccggccattccaccacttctttaaaatagtaagaattcttaaaaaccatattccttgtttgatggaagagtaagatgttaacagagggcatcaaagggccagaggtgtctttgaatttattttttttcaatgtcttttctgagcttcagccttagcttttcagatcttcctcctacctgttcatttattcagccttctatctggtcatcctccccagcggctcctctctctgatgtgtccacctacggtggaacgaggattgcctttctgtgctccccatcaggactttgctgtcttggccggcaggagtcgtgctgctgcagagcctcacaggctgtgccttgtttcaggaaacagctcctaatactctcccatcactcactttacctgtctccatcttatttccctatactcctattgtcagcttgagactttttttttttttcaattccaaatgaagggtatgacctcagagtgagtgaggactcagtaaagactcacctctccttacttggtttattaaatgtcttcagattccagagataagacaaggtggccacttcacaaagaatccagaatcatgctcagtaaagctcattaaaagccactgcagctgagaaggttcacagcccttctttatagccacagaggcagcacacaggggaggtgggaagacacagggaaacgagagaagaaggataatgaggccttgaggtgttctgcccccaatttcaaggagcttatcaggcttcatgtgcaatttggggaggggagctttttgatggtgggtaaataatggctctacaaagattacctgactccactgacacaagaatatgtattctcagctgatataactgtgtgttcacatcccatccatagaactcactgaaggagattcatcaagtcagccttttggactgggttggggtttggggagtggatttggggatagagagaaaggtgtacttagtacacattttctaatgggcgttacgtgaactgtttgaacctgctgagtggcgctttgtagagctccatgttcacgttcagtgtcaacaccattcaacagctttgcacatcttcgtacaacataatctggctttggtgccccttgagccacctgtagaataatttatagcagggtcccacaatctactgcaatgatcgtgaacagttatcagtggatatagtgctccaagagtcaaattgtatccgttaagggttttctaacttttgctatcccccccgcgaccaaaaaaagggggggtttataatttaaagaaaaggaaaagaggcgtgggttggtagttgtgtccttaacatttaggaatgacatagcctctggagtctacaaactgaagaaactttcatctgatcagccttggaaatccaaagttaaagagcctatgtgtctcttgaggcgggggttagaggattcaaatttgggatgatgctcattgattcctgaccatagcagtgagaggccattttttgtgcaggaaatgtgcttaggactcagtcttgttttcgattatccaccacagaaaccctgagacacagagcagcttagaagtctctacccaggcgtaaatagagctccctactccagaccacctgccacccacctcccaagttgagaacacaagctccagctgggctggagagtcaggcttggtgcagggtgactttggcgaagttttgtcagatccataaagcaaactggaatttgagctttcacttaccctagtatacgttcttaaaaaaaaaaaaaagtctatgtggtataatcgagatggatacctgtgtctttaaattacgtagggaattttgtatgtttaaataattgtactgggttccataatgcttatcttagaaactttagtaaaagaaaatatatgaaccgtgcatttgtgaatgccccccttagagcattcatccaagttcagtgtgtagtgtgatggttattatagatatttaaagtatagtaagtggctgtgtaacaggagagactgctgtttacctacgtactgaagggtaactgctgcccgcgtaattaaatcagtattgtcctttcctgtcggtttgatcaattgcggtaccggtagcttcctgcttgtgactgttacctaattgtgtcaatgtacatctgtagtatgtacatgtgaaagtgcctttctattttagaggagttttagccttgctcttgtaccgttgccccgctctgtgccccacccccacctcctcctcccaattcctgctgcccactcgagtgtttcgaagcttcctccctgtcccccaccttccccatccccgccttcctgtgcctcggtgctcagtaatgtcccatctcacctccctgtcggtcctcagactgtctcgttttccttgtagacgtgattgtgcctttctcacccctgtgtcctcccatcccaccgcatcagtcccccgctcatgtgctgctgacagcatcgcattcgcccgtgctctgtactgcctctcaccatttcattccctcctctctgaggtgaaaataaagggggatgcttttacagtctggaaagaaaaaaaatgttttgttaatctgttgtgacaatgcacttttatgtatagtactgtacatttttggcatgtaccattacaggcttcagtatacagtcaggtttgttcttcacggtgtatctttataataaataagatagttctggc

SEQ ID NO: 288 - protein, 1085 aa, Homo Sapiens
MSTPSRFKKDKEIIAEYESQVKEIRAQLVEQQKCLEQQTEMRVQLLQDLQDFFRKKAEIETEYSRNLEKLAERFMAKTRSTKDHQQYKKDQNLLSPVNCWYLLLNQVRRESKDHATLSDIYLNNVIMRFMQISEDSTRMFKKSKEIAFQLHEDLMKVLNELYTVMKTYHMYHAESISAESKLKEAEKQEEKQIGRSGDPVFHIRLEERHQRRSSVKKIEKMKEKRQAKYSENKLKSIKARNEYLLTLEATNASVFKYYIHDLSDLIDCCDLGYHASLNRALRTYLSAEYNLETSRHEGLDIIENAVDNLEPRSDKQRFMEMYPAAFCPPMKFEFQSHMGDEVCQVSAQQPVQAELMLRYQQLQSRLATLKIENEEVKKTTEATLQTIQDMVTIEDYDVSECFQHSRSTESVKSTVSETYLSKPSIAKRRANQQETEQFYFMKLREYLEGSNLITKLQAKHDLLQRTLGEGHRAEYMTTRPPNVPPKPQKHRKSRPRSQYNTKLFNGDLETFVKDSGQVIPLIVESCIRFINLYGLQHQGIFRVSGSQVEVNDIKNSFERGENPLADDQSNHDINSVAGVLKLYFRGLENPLFPKERFNDLISCIRIDNLYERALHIRKLLLTLPRSVLIVMRYLFAFLNHLSQYSDENMMDPYNLAICFGPTLMPVPEIQDQVSCQAHVNEIIKTIIIHHETIFPDAKELDGPVYEKCMAGDDYCDSPYSEHGTLEEVDQDAGTEPHTSEDECEPIEAIAKFDYVGRSARELSFKKGASLLLYHRASEDWWEGRHNGIDGLVPHQYIVVQDMDDTFSDTLSQKADSEASSGPVTEDKSSSKDMNSPTDRHPDGYLARQRKRGEPPPPVRRPGRTSDGHCPLHPPHALSNSSVDLGSPSLASHPRGLLQNRGLNNDSPERRRRPGHGSLTNISRHDSLKKIDSPPIRRSTSSGQYTGFNDHKPLDPETIAQDIEETMNTALNELRELERQSTAKHAPDVVLDTLEQVKNSPTPATSTESLSPLHNVALRSSEPQIRRSTSSSSDTMSTFKPMVAPRMGVQLKPPALRPKPAVLPKTNPTIGPAPPPQGPTDKSCTM

SEQ ID NO: 289 - DNA, 1591 bp, Homo Sapiens
atataagcgttggcggagcgtcggttgtagcactctgcgcgcccgctcttctgctgctgtttgtctacttcctcctgcttccccgccgccgccgccgccatcatgagggaaatcgtgcacttgcaggccgggcagtgcggcaaccaaatcggcgccaagttttgggaggtgatcagcgatgagcacggcatcgaccccacgggcacctaccacggggacagcgacctgcagctggaacgcatcaacgtgtactacaatgaggccaccggcggcaagtacgtgccccgcgccgtgctcgtggatctggagcccggcaccatggactccgtgcgctcggggcccttcgggcagatcttccggccggacaacttcgttttcggtcagagtggtgctgggaacaactgggccaaggggcactacacagaaggcgcggagctggtggactcggtgctggatgttgtgagaaaggaggctgagagctgtgactgcctgcagggtttccagctgacccactccctgggtggggggactgggtctgggatgggtaccctcctcatcagcaagatccgggaggagtacccagacaggatcatgaacacgtttagtgtggtgccttcgcccaaagtgtcagacacagtggtggagccctacaacgccaccctctcagtccaccagctcgtagaaaacacagacgagacctactgcattgataacgaagctctctacgacatttgcttcagaaccctaaagctgaccacgcccacctatggtgacctgaaccacctggtgtctgctaccatgagtggggtcaccacctgcctgcgcttcccaggccagctcaatgctgacctgcggaagctggctgtgaacatggtcccgtttccccggctgcacttcttcatgcccggctttgccccactgaccagccggggcagccagcagtaccgggcgctgaccgtgcccgagctcacccagcagatgtttgatgccaagaacatgatggctgcctgcgacccccgccatggccgctacctgacggttgccgccgtgttcaggggccgcatgtccatgaaggaggtggatgagcaaatgcttaatgtccaaaacaaaaacagcagctattttgttgagtggatccccaacaatgtgaaaacggctgtctgtgacatcccacctcgggggctaaaaatgtccgccaccttcattggcaacagcacggccatccaggagctgttcaagcgcatctccgagcagttcacggccatgttccggcgcaaggccttcctgcactggtacacgggcgagggcatggacgagatggagttcaccgaggccgagagcaacatgaatgacctggtgtccgagtaccagcagtaccaggatgccacagccgaggaggagggcgagttcgaggaggaggctgaggaggaggtggcctagagccttcagtcactggggaaagcagggaagcagtgtgaactctttattcactcccagcctgtcctgtggcctgtcccactgtgtgcacttgctgttttccctgtccacatccatgctgtacagacaccaccattaaagcattttcatagtg

SEQ ID NO: 290 - protein, 445 aa, Homo Sapiens
MREIVHLQAGQCGNQIGAKFWEVISDEHGIDPTGTYHGDSDLQLERINVYYNEATGGKYVPRAVLVDLEPGTMDSVRSGPFGQIFRPDNFVFGQSGAGNNWAKGHYTEGAELVDSVLDVVRKEAESCDCLQGFQLTHSLGGGTGSGMGTLLISKIREEYPDRIMNTFSVVPSPKVSDTVVEPYNATLSVHQLVENTDETYCIDNEALYDICFRTLKLTTPTYGDLNHLVSATMSGVTTCLRFPGQLNADLRKLAVNMVPFPRLHFFMPGFAPLTSRGSQQYRALTVPELTQQMFDAKNMMAACDPRHGRYLTVAAVFRGRMSMKEVDEQMLNVQNKNSSYFVEWIPNNVKTAVCDIPPRGLKMSATFIGNSTAIQELFKRISEQFTAMFRRKAFLHWYTGEGMDEMEFTEAESNMNDLVSEYQQYQDATAEEEGEFEEEAEEEVA

SEQ ID NO: 291 - DNA, 2027 bp, Homo Sapiens
agcgcagggcggtaactctgggcggggctgggctccagggctggacagcacagtccctctgaactgcacagagacctcgcaggccccgagaactgtcgcccttccacgatgtggctccgtgcctttatcctggccactctctctgcttccgcggcttgggcagggcatccgtcctcgccacctgtggtggacaccgtgcatggcaaagtgctggggaagttcgtcagcttagaaggatttgcacagcctgtggccattttcctgggaatcccttttgccaagccgcctcttggacccctgaggtttactccaccgcagcctgcagaaccatggagctttgtgaagaatgccacctcgtaccctcctatgtgcacccaagatcccaaggcggggcagttactctcagagctatttacaaaccgaaaggagaacattcctctcaagctttctgaagactgtctttacctcaatatttacactcctgctgacttgaccaagaaaaacaggctgccggtgatggtgtggatccacggaggggggctgatggtgggtgcggcatcaacctatgatgggctggcccttgctgcccatgaaaacgtggtggtggtgaccattcaatatcgcctgggcatctggggattcttcagcacaggggatgaacacagccgggggaactggggtcacctggaccaggtggctgccctgcgctgggtccaggacaacattgccagctttggagggaacccaggctctgtgaccatctttggagagtcagcgggaggagaaagtgtctctgttcttgttttgtctccattggccaagaacctcttccaccgggccatttctgagagtggcgtggccctcacttctgttctggtgaagaaaggtgatgtcaagcccttggctgagcaaattgctatcactgctgggtgcaaaaccaccacctctgctgtcatggttcactgcctgcgacagaagacggaagaggagctcttggagacgacattgaaaatgaaattcttatctctggacttacagggagaccccagagagagtcaaccccttctgggcactgtgattgatgggatgctgctgctgaaaacacctgaagagcttcaagctgaaaggaatttccacactgtcccctacatggtcggaattaacaagcaggagtttggctggttgattccaatgcagttgatgagctatccactctccgaagggcaactggaccagaagacagccatgtcactcctgtggaagtcctatccccttgtttgcattgctaaggaactgattccagaagccactgagaaatacttaggaggaacagacgacactgtcaaaaagaaagacctgttcctggacttgatagcagatgtgatgtttggtgtcccatctgtgattgtggcccggaaccacagagatgctggagcacccacctacatgtatgagtttcagtaccgtccaagcttctcatcagacatgaaacccaagacggtgataggagaccacggggatgagctcttctccgtctttggggccccatttttaaaagagggtgcctcagaagaggagatcagacttagcaagatggtgatgaaattctgggccaactttgctcgcaatggaaaccccaatggggaagggctgccccactggccagagtacaaccagaaggaagggtatctgcagattggtgccaacacccaggcggcccagaagctgaaggacaaagaagtagctttctggaccaacctctttgccaagaaggcagtggagaagccaccccagacagaacacatagagctgtgaatgaagatccagccggccttgggagcctggaggagcaaagactggggtcttttgcgaaagggattgcaggttcagaaggcatcttaccatggctggggaattgtctggtggtggggggcaggggacagaggccatgaaggagcaagttttgtatttgtgacctcagctttgggaataaaggatcttttgaaggccaaaaaaaaaaaaaaaaa

SEQ ID NO: 292 - protein, 568 aa, Homo Sapiens
MWLRAFILATLSASAAWAGHPSSPPVVDTVHGKVLGKFVSLEGFAQPVAIFLGIPFAKPPLGPLRFTPPQPAEPWSFVKNATSYPPMCTQDPKAGQLLSELFTNRKENIPLKLSEDCLYLNIYTPADLTKKNRLPVMVWIHGGGLMVGAASTYDGLALAAHENVVVVTIQYRLGIWGFFSTGDEHSRGNWGHLDQVAALRWVQDNIASFGGNPGSVTIFGESAGGESVSVLVLSPLAKNLFHRAISESGVALTSVLVKKGDVKPLAEQIAITAGCKTTTSAVMVHCLRQKTEEELLETTLKMKFLSLDLQGDPRESQPLLGTVIDGMLLLKTPEELQAERNFHTVPYMVGINKQEFGWLIPMQLMSYPLSEGQLDQKTAMSLLWKSYPLVCIAKELIPEATEKYLGGTDDTVKKKDLFLDLIADVMFGVPSVIVARNHRDAGAPTYMYEFQYRPSFSSDMKPKTVIGDHGDELFSVFGAPFLKEGASEEEIRLSKMVMKFWANFARNGNPNGEGLPHWPEYNQKEGYLQIGANTQAAQKLKDKEVAFWTNLFAKKAVEKPPQTEHIEL

SEQ ID NO: 293 - DNA, 3913 bp, Homo Sapiens
ctttcactggcaagagacggagtcctgggtttcagttccagttgcctgcggtgggctgtgtgagtttgccaaagtcccctgccctctctgggtctcggttccctcgcctgtccacgtgaggttggaggagctgaacgccgacgtcatttttagctaagagggagcagggtccccgagtcgccggcccagggtctgcgcatccgaggccgcgcgccctttcccctcccccacggctcctccgggccccgcactctgcgccccggctgccgcccagcgccctacaccgccctcagggggccctcgcgggctccccccggccgggatgccagtgccccgcgccacgcgcgcctgctcccgcgccgcctgccctgcagcctgcccgcggcgcctttatacccagcgggctcggcgctcactaatgtttaactcggggccgaaacttgccagcggcgagtgactccaccgcccggagcagcggtgcaggacgcgcgtctccgccgcccgcggtgacttctgcctgcgctccttctctgaacgctcacttccgaggagacgccgacgatgaagacaccgtggaaggttcttctgggactgctgggtgctgctgcgcttgtcaccatcatcaccgtgcccgtggttctgctgaacaaaggcacagatgatgctacagctgacagtcgcaaaacttacactctaactgattacttaaaaaatacttatagactgaagttatactccttaagatggatttcagatcatgaatatctctacaaacaagaaaataatatcttggtattcaatgctgaatatggaaacagctcagttttcttggagaacagtacatttgatgagtttggacattctatcaatgattattcaatatctcctgatgggcagtttattctcttagaatacaactacgtgaagcaatggaggcattcctacacagcttcatatgacatttatgatttaaataaaaggcagctgattacagaagagaggattccaaacaacacacagtgggtcacatggtcaccagtgggtcataaattggcatatgtttggaacaatgacatttatgttaaaattgaaccaaatttaccaagttacagaatcacatggacggggaaagaagatataatatataatggaataactgactgggtttatgaagaggaagtcttcagtgcctactctgctctgtggtggtctccaaacggcacttttttagcatatgcccaatttaacgacacagaagtcccacttattgaatactccttctactctgatgagtcactgcagtacccaaagactgtacgggttccatatccaaaggcaggagctgtgaatccaactgtaaagttctttgttgtaaatacagactctctcagctcagtcaccaatgcaacttccatacaaatcactgctcctgcttctatgttgataggggatcactacttgtgtgatgtgacatgggcaacacaagaaagaatttctttgcagtggctcaggaggattcagaactattcggtcatggatatttgtgactatgatgaatccagtggaagatggaactgcttagtggcacggcaacacattgaaatgagtactactggctgggttggaagatttaggccttcagaacctcattttacccttgatggtaatagcttctacaagatcatcagcaatgaagaaggttacagacacatttgctatttccaaatagataaaaaagactgcacatttattacaaaaggcacctgggaagtcatcgggatagaagctctaaccagtgattatctatactacattagtaatgaatataaaggaatgccaggaggaaggaatctttataaaatccaacttagtgactatacaaaagtgacatgcctcagttgtgagctgaatccggaaaggtgtcagtactattctgtgtcattcagtaaagaggcgaagtattatcagctgagatgttccggtcctggtctgcccctctatactctacacagcagcgtgaatgataaagggctgagagtcctggaagacaattcagctttggataaaatgctgcagaatgtccagatgccctccaaaaaactggacttcattattttgaatgaaacaaaattttggtatcagatgatcttgcctcctcattttgataaatccaagaaatatcctctactattagatgtgtatgcaggcccatgtagtcaaaaagcagacactgtcttcagactgaactgggccacttaccttgcaagcacagaaaacattatagtagctagctttgatggcagaggaagtggttaccaaggagataagatcatgcatgcaatcaacagaagactgggaacatttgaagttgaagatcaaattgaagcagccagacaattttcaaaaatgggatttgtggacaacaaacgaattgcaatttggggctggtcatatggagggtacgtaacctcaatggtcctgggatcgggaagtggcgtgttcaagtgtggaatagccgtggcgcctgtatcccggtgggagtactatgactcagtgtacacagaacgttacatgggtctcccaactccagaagacaaccttgaccattacagaaattcaacagtcatgagcagagctgaaaattttaaacaagttgagtacctccttattcatggaacagcagatgataacgttcactttcagcagtcagctcagatctccaaagccctggtcgatgttggagtggatttccaggcaatgtggtatactgatgaagaccatggaatagctagcagcacagcacaccaacatatatatacccacatgagccacttcataaaacaatgtttctctttaccttagcacctcaaaataccatgccatttaaagcttattaaaactcatttttgttttcattatctcaaaactgcactgtcaagatgatgatgatctttaaaatacacactcaaatcaagaaacttaaggttacctttgttcccaaatttcatacctatcatcttaagtagggacttctgtcttcacaacagattattaccttacagaagtttgaattatccggtcgggttttattgtttaaaatcatttctgcatcagctgctgaaacaacaaataggaattgtttttatggaggctttgcatagattccctgagcaggattttaatctttttctaactggactggttcaaatgttgttctcttctttaaagggatggcaagatgtgggcagtgatgtcactagggcagggacaggataagagggattagggagagaagatagcagggcatggctgggaacccaagtccaagcataccaacacgagcaggctactgtcagctcccctcggagaagagctgttcacagccagactggcacagttttctgagaaagactattcaaacagtctcaggaaatcaaatatgcaaagcactgacttctaagtaaaaccacagcagttgaaaagactccaaagaaatgtaagggaaactgccagcaacgcaggcccccaggtgccagttatggctataggtgctacaaaaacacagcaagggtgatgggaaagcattgtaaatgtgcttttaaaaaaaaatactgatgttcctagtgaaagaggcagcttgaaactgagatgtgaacacatcagcttgccctgttaaaagatgaaaatatttgtatcacaaatcttaacttgaaggagtccttgcatcaatttttcttatttcatttctttgagtgtcttaattaaaagaatattttaacttccttggactcattttaaaaaatggaacataaaatacaatgttatgtattattattcccattctacatactatggaatttctcccagtcatttaataaatgtgccttcattttttcagaaaaaaaaaaaaaaa

SEQ ID NO: 294 - protein, 766 aa, Homo Sapiens
MKTPWKVLLGLLGAAALVTIITVPVVLLNKGTDDATADSRKTYTLTDYLKNTYRLKLYSLRWISDHEYLYKQENNILVFNAEYGNSSVFLENSTFDEFGHSINDYSISPDGQFILLEYNYVKQWRHSYTASYDIYDLNKRQLITEERIPNNTQWVTWSPVGHKLAYVWNNDIYVKIEPNLPSYRITWTGKEDIIYNGITDWVYEEEVFSAYSALWWSPNGTFLAYAQFNDTEVPLIEYSFYSDESLQYPKTVRVPYPKAGAVNPTVKFFVVNTDSLSSVTNATSIQITAPASMLIGDHYLCDVTWATQERISLQWLRRIQNYSVMDICDYDESSGRWNCLVARQHIEMSTTGWVGRFRPSEPHFTLDGNSFYKIISNEEGYRHICYFQIDKKDCTFITKGTWEVIGIEALTSDYLYYISNEYKGMPGGRNLYKIQLSDYTKVTCLSCELNPERCQYYSVSFSKEAKYYQLRCSGPGLPLYTLHSSVNDKGLRVLEDNSALDKMLQNVQMPSKKLDFIILNETKFWYQMILPPHFDKSKKYPLLLDVYAGPCSQKADTVFRLNWATYLASTENIIVASFDGRGSGYQGDKIMHAINRRLGTFEVEDQIEAARQFSKMGFVDNKRIAIWGWSYGGYVTSMVLGSGSGVFKCGIAVAPVSRWEYYDSVYTERYMGLPTPEDNLDHYRNSTVMSRAENFKQVEYLLIHGTADDNVHFQQSAQISKALVDVGVDFQAMWYTDEDHGIASSTAHQHIYTHMSHFIKQCFSLP

SEQ ID NO: 295 - DNA, 1601 bp, Homo Sapiens
ggcgaccgcggctgaggtacaggtgcctcgcggtgcagccgggtcgccttccagcccgtccgcctcccgaccagggcccgcgccccgtcccgcctctctcccgcccagccaaatgcaggccgccgccctccctgaggagatccgttggctcctggaagatgctgaagagtttctggcagaaggtttgcggaatgagaacctcagcgctgttgcaagggatcacagagaccatattctacggggctttcagcaaatcaaagccaggtactattgggattttcagccccaagggggagacattggacaggacagctctgatgataatcacagcgggactcttggcctgtccctcacatccgatgcaccctttttgtcagattatcaggatgagggaatggaagacatcgtaaaaggagctcaagaacttgataacgtaatcaagcaaggatacttggagaagaaaagcaaagatcatagtttctttggatcggagtggcagaagcgatggtgtgttgtcagcagaggtctcttctactactatgctaatgagaagagcaagcagcccaaagggaccttcctcattaagggctacggtgtacggatggccccccacctgcgaagagattccaagaaagaatcctgctttgaactgacctcccaggataggcgcagctatgagtttacagctactagtccagcagaagccagagactgggtggatcaaataagtttcttgttaaaggatctgagctccttaaccattccatatgaagaggatgaggaggaagaagaaaaagaagagacatatgatgatattgatggttttgactccccaagttgtggttcccagtgcagacccactatcttgcctgggagtgtggggataaaagagcctacagaggagaaagaagaagaagatatttatgaagtcttgccagatgaagagcatgatctagaagaggatgagagtggcactcgacgaaaaggagtagactatgccagttactaccagggcctatgggattgccatggtgaccagccagatgaactgtccttccaacggggtgacctcatccgtattctgagcaaggagtataacatgtatggctggtgggtgggagaactgaacagcctcgttgggattgttccaaaggagtatctcaccactgcctttgaagtggaagaaagatgaaacccaggaaatatattcttccctctctcctgcctttatgaggaaactgatcatcaaaagttcccactccctacttctgccaccccaccaacgccttggactcctctctttgctgaagagacccaagtctcttgacacctcagagtgactgtaagctaccagtaagacaagtgggaagaggcacgttcatcaaacctgttactaaaccagcctagtcatagctcatccccatctctaaatgtgtccacacaaccacatctgccttttccacaagcttttcacaaagaaggtgagagagaaggaaaccttgggaggaggacattactggttgttctggctggtttgaaaagcacaaataaacttgggatgtggttccttgccatgaaaaaaaaaaaaaaaaaaaaaaaaa

SEQ ID NO: 296 - protein, 359 aa, Homo Sapiens
MQAAALPEEIRWLLEDAEEFLAEGLRNENLSAVARDHRDHILRGFQQIKARYYWDFQPQGGDIGQDSSDDNHSGTLGLSLTSDAPFLSDYQDEGMEDIVKGAQELDNVIKQGYLEKKSKDHSFFGSEWQKRWCVVSRGLFYYYANEKSKQPKGTFLIKGYGVRMAPHLRRDSKKESCFELTSQDRRSYEFTATSPAEARDWVDQISFLLKDLSSLTIPYEEDEEEEEKEETYDDIDGFDSPSCGSQCRPTILPGSVGIKEPTEEKEEEDIYEVLPDEEHDLEEDESGTRRKGVDYASYYQGLWDCHGDQPDELSFQRGDLIRILSKEYNMYGWWVGELNSLVGIVPKEYLTTAFEVEER

SEQ ID NO: 297 - DNA, 2164 bp, Homo Sapiens
ataaatatcagagtgtgctgctgtggctttgtggagctgccagagtaaagcaaagagaaaggaagcaggcccgttggaagtggttgtgacaaccccagcaatgtggagaagcctggggcttgccctggctctctgtctcctcccatcgggaggaacagagagccaggaccaaagctccttatgtaagcaacccccagcctggagcataagagatcaagatccaatgctaaactccaatggttcagtgactgtggttgctcttcttcaagccagctgatacctgtgcatactgcaggcatctaaattagaagacctgcgagtaaaactgaagaaagaaggatattctaatatttcttatattgttgttaatcatcaaggaatctcttctcgattaaaatacacacatcttaagaataaggtttcagagcatattcctgtttatcaacaagaagaaaaccaaacagatgtctggactcttttaaatggaagcaaagatgacttcctcatatatgatagatgtggccgtcttgtatatcatcttggtttgcctttttccttcctaactttcccatatgtagaagaagccattaagattgcttactgtgaaaagaaatgtggaaactgctctctcacgactctcaaagatgaagacttttgtaaacgtgtatctttggctactgtggataaaacagttgaaactccatcgcctcattaccatcatgagcatcatcacaatcatggacatcagcaccttggcagcagtgagctttcagagaatcagcaaccaggagcaccaaatgctcctactcatcctgctcctccaggccttcatcaccaccataagcacaagggtcagcataggcagggtcacccagagaaccgagatatgccagcaagtgaagatttacaagatttacaaaagaagctctgtcgaaagagatgtataaatcaattactctgtaaattgcccacagattcagagttggctcctaggagctgatgctgccattgtcgacatctgatatttgaaaaaacagggtctgcaatcacctgacagtgtaaagaaaacctcccatctttatgtagctgacagggacttcgggcagaggagaacataactgaatcttgtcagtgacgtttgcctccagctgcctgacaaataagtcagcagcttatacccacagaagccagtgccagttgacgctgaaagaatcaggcaaaaaagtgagaatgaccttcaaactaaatatttaaaataggacatactccccaatttagtctagacacaatttcatttccagcatttttataaactaccaaattagtgaaccaaaaatagaaattagatttgtgcaaacatggagaaatctactgaattggcttccagattttaaattttatgtcatagaaatattgactcaaaccatattttttatgatggagcaactgaaaggtgattgcagcttttggttaatatgtctttttttttctttttccagtgttctatttgctttaatgagaatagaaacgtaaactatgacctaggggtttctgttggataattagcagtttagaatggaggaagaacaacaaagacatgctttccatttttttctttacttatctctcaaaacaatattactttgtcttttcaatcttctacttttaactaataaaataagtggattttgtattttaagatccagaaatacttaacacgtgaatattttgctaaaaaagcatatataactattttaaatatccatttatcttttgtatatctaagactcatcctgatttttactatcacacatgaataaagcctttgtatctttctttctctaatgttgtatcatactcttctaaaacttgagtggctgtcttaaaagatataaggggaaagataatattgtctgtctctatattgcttagtaagtatttccatagtcaatgatggtttaataggtaaaccaaaccctataaacctgacctcctttatggttaatactattaagcaagaatgcagtacagaattggatacagtacggatttgtccaaataaattcaataaaaaccttaaagctgaaaaaaaaaaaaaaaaaaaaaaaaaaaaaaaaaaaaaaaaaaaaaaaaaaaaaaaaaaaaaaaaaaaaaaaaaaaaaaa

SEQ ID NO: 298 - protein, 371 aa, Homo Sapiens
MWRSLGLALALCLLPSGGTESQDQSSLCKQPPAWSIRDQDPMLNSNGSVTVVALLQASYLCILQASKLEDLRVKLKKEGYSNISYIVVNHQGISSRLKYTHLKNKVSEHIPVYQQEENQTDVWTLLNGSKDDFLIYDRCGRLVYHLGLPFSFLTFPYVEEAIKIAYCEKKCGNCSLTTLKDEDFCKRVSLATVDKTVETPSPHYHHEHHHNHGHQHLGSSELSENQQPGAPNAPTHPAPPGLHHHHKHKGQHRQGHPENRDMPASEDLQDLQKKLCRKRCINQLLCKLPTDSELAPRSCCHCRHLIFEKTGSAITQCKENLPSLCSQGLRAEENITESCQRLPPAAQISQQLIPTEASASRKNQAKKEPSN

SEQ ID NO: 299 - DNA, 4400 bp, Homo Sapiens
acgcggggctcgggtggccgcggcagcagcagcagcaacccccgccgctcgcggtcggcccccgggccgcagccatggtcccgagtggcggcgtcccccagggcctcggcggccgctctgcctgcgcgctgctcctgctctgctacctgaatgttgtaccatctttgggtaggcagactttccctgacgacatcagtgatacccaaagctgagcagagcgtggcttacaaagactttatttattttactgtctttgaaggaaacgttcgcaacgtttctgaagtctcggttgagtatttatgctctcagccttgtgttgtcaatttggaagcagttgtttcatctgagttcagaagtagcattcccgtgtacaaaaaaaggtggaagaatgagaaacatcttcacaccagcaggacacaaatagtacatgtgaaatttccaggcattatggtttacagagatgattatttcatcagacattccatctctgtatctgcagtgatagtacgcgcctggattactcacaaatacagtggcagagactggaatgttaaatgggaggaaaacttgctccatgctgtagcaaagaattataccctcctgcagaccatcccgccttttgaacgccctttcaaagatcatcaagtgtgccttgagtggaacatgggttatatttggaaccttcgggcaaacaggattccacagtgtcctctggaaaatgatgtggttgccctgcttggctttccttatgcctccagtggagaaaacacaggcattgtcaagaagttcccgaggtttcggaaccgagagctggaggccactcgacgccagaggatggattacccagtgtttactgtttcattgtggctttatttactccattattgcaaggccaacctctgtgggattctgtactttgttgactctaatgagatgtacggcacaccttctgtatttcttacggaagagggctatttgcatattcagatgcatcttgtcaaaggggaagaccttgctgtaaaaactaaattcatcatacctttgaaggagtggtttcgactggatatctcttttaacggaggccagatagtagtaaccactagcattggacaggatttgaaaagctaccacaatcagaccattagcttccgggaggatttccattataatgacacagctgggtacttcattattggagggagcaggtatgtggctggcattgaagggttttttggacccctgaagtactatcgccttcgcagtctgcaccccgcccagatttttaatcccctccttgagaagcaacttgctgaacaaatcaagttatattatgaaaggtgtgctgaggttcaagaaatagtatctgtgtatgcatctgcagcaaagcacgggggcgagagacaagaagcatgccacctccacaactcctacctggacctccagcgcaggtatgggagaccctcgatgtgcagagccttcccctgggagaaggagctgaaagacaaacaccccagcttgttccaggcattgctggagatggatctgctgaccgtgccaaggaaccaaaatgaatctgtatcagaaatcggtgggaagatatttgagaaggctgtaaagagactctctagcattgatggtcttcaccaaattagctctatcgtcccctttctgacggattccagctgctgtggataccataaagcatcctactaccttgcagtcttttatgagactggattaaatgttcctcgggatcagctgcagggcatgttgtatagtttggttggaggccaggggagtgagaggctgtcttcaatgaatcttgggtataaacactaccagggtattgacaactaccccctggactgggaactgtcgtatgcctactacagcaacattgccaccaagacaccccttgaccagcacacactgcaaggagatcaggcatatgttgaaacaattagactaaaagatgatgaaatactcaaggtacaaaccaaagaagatggagatgtctttatgtggttgaagcatgaagctacccgaggcaatgcagcagctcagcaacgattggcccagatgctgttctgggggcagcaaggtgtggccaagaatcccgaagcagcaattgagtggtacgccaagggcgccctggagacggaggatcctgcgttaatctatgactatgccattgtgctattcaagggtcaaggagtaaaaaagaacagacggcttgccttagagctgatgaagaaagcagcttccaagggattgcatcaggcagtcaatggcctgggatggtattaccacaaattcaagaaaaattacgccaaagcagcaaagtactggttaaaagcagaagaaatggggaacccagatgcgtcatacaatcttggagtcctgcatttggatggcatcttccctggagttcctggaaggaatcaaactttagctggtgaaattttccataaggctgcgcaaggtggacacatggaagggaccttgtggtgttctctctactatatcacaggcaacctggagacattccctagagatcctgagaaagctgttgtatgggcaaaacatgtagctgagaaaaatggctacttgggccatgtcatccgcaaaggcctcaatgcctacctggaaggttcatggcatgaagctttgctgtattatgttttagcagcagaaactggaattgaagtgtcacagacaaatttagcacacatctgtgaggagaggccagacctggccaggagatacttgggtgttaactgtgtttggagatactataatttctctgtttttcaaatcgatgctccttcctttgcatatttgaagatgggagacctttactactatggccaccaaaaccagtcacaagacctggagttgtctgtgcagatgtacgcccaagccgccctggatggagactcccagggattttttaacctggccctgctaatcgaggaaggtacgataatcccacaccatatcttggatttcttggaaattgactcaactctccattctaataacatctccattctccaggaactgtacgaaaggtgctggagccacagtaacgaggagtccttcagcccctgctccttggcctggctttacctgcacttgcggcttctctggggtgctatcctgcactcagccctgatctactttctgggaacctttctgctatccatattgatcgcctggactgtgcagtatttccagtctgtctcagcaagcgatccccctccaagaccatcccaggcctccccagacactgccacatccactgcaagtccagctgtgactccagctgcagatgcctctgaccaagaccagcccacagtaactaataacccggagccacgtgggtgaactgtgcactccagttctctccagatgagagagaatcttttcaacagctggtattgggaagctggggccagggcatgatcctgataaacaccttaaatgtcttgtcaactggatgcaaattttgcaattggtgtcattttttttaaagtcaaattacaaggaagtacccagatcaggcagtggtaataccaaaggtcatcaaacacatacaaggaacatcttgatcatagggcatgtggggaagtttactgggccatcacagacttttgttctagtgattgtatgtattaggagtcatagcatgccctacggcagatctggattcttatacactaagatgtgtcttaagaatcacagtgcgtgcttcatccctttattgaagaacagaaaattatgactactctacaaggtggataatattttggtacctgtgcttgccacagccctgttcctcaaagctgaattgatagatttctctttgacttccaagacctagcagttataaggcaccttgaaataaattgtttgtgcctggaaatgcagggagggcaatagctttgtaaattggtttacatttttctccttgaatttttctagggtcctagtgcttccgaatcatttaatggcattgtcggatatcttttacatttcaattgcaatccatgaaattacatttagaagattcttagtacttaactgtagtcttctccatgaattacacgttagaatagactggcagcaacggaatatgcagcaagtaagcctctagcttatagtttcatccctacccctcatgcctgcgtgagtctgtacagggatatgtgtgtgtgtgtgtgtgtgtgtgtgttagagaggaagaggaagagcagaatgtctgtatactacatgctgctaaggtagtgaataaatcagtaatgcaatattgtgggtccaaactactctttgcactactttatttacagtagtaaataaaattatttttatacaattgactaccaaaaaaaaaaaaaaaa

SEQ ID NO: 300 - protein, 979 aa, Homo Sapiens
MVYRDDYFIRHSISVSAVIVRAWITHKYSGRDWNVKWEENLLHAVAKNYTLLQTIPPFERPFKDHQVCLEWNMGYIWNLRANRIPQCPLENDVVALLGFPYASSGENTGIVKKFPRFRNRELEATRRQRMDYPVFTVSLWLYLLHYCKANLCGILYFVDSNEMYGTPSVFLTEEGYLHIQMHLVKGEDLAVKTKFIIPLKEWFRLDISFNGGQIVVTTSIGQDLKSYHNQTISFREDFHYNDTAGYFIIGGSRYVAGIEGFFGPLKYYRLRSLHPAQIFNPLLEKQLAEQIKLYYERCAEVQEIVSVYASAAKHGGERQEACHLHNSYLDLQRRYGRPSMCRAFPWEKELKDKHPSLFQALLEMDLLTVPRNQNESVSEIGGKIFEKAVKRLSSIDGLHQISSIVPFLTDSSCCGYHKASYYLAVFYETGLNVPRDQLQGMLYSLVGGQGSERLSSMNLGYKHYQGIDNYPLDWELSYAYYSNIATKTPLDQHTLQGDQAYVETIRLKDDEILKVQTKEDGDVFMWLKHEATRGNAAAQQRLAQMLFWGQQGVAKNPEAAIEWYAKGALETEDPALIYDYAIVLFKGQGVKKNRRLALELMKKAASKGLHQAVNGLGWYYHKFKKNYAKAAKYWLKAEEMGNPDASYNLGVLHLDGIFPGVPGRNQTLAGEIFHKAAQGGHMEGTLWCSLYYITGNLETFPRDPEKAVVWAKHVAEKNGYLGHVIRKGLNAYLEGSWHEALLYYVLAAETGIEVSQTNLAHICEERPDLARRYLGVNCVWRYYNFSVFQIDAPSFAYLKMGDLYYYGHQNQSQDLELSVQMYAQAALDGDSQGFFNLALLIEEGTIIPHHILDFLEIDSTLHSNNISILQELYERCWSHSNEESFSPCSLAWLYLHLRLLWGAILHSALIYFLGTFLLSILIAWTVQYFQSVSASDPPPRPSQASPDTATSTASPAVTPAADASDQDQPTVTNNPEPRG

SEQ ID NO: 301 - DNA, 2272 bp, Homo Sapiens
attgctgtgtcaagttccagagaaaagcttctgttcgtccaagttactaaccaggctaaaccacatagacgtgaaggaaggggctagaaggaagggagtgccccactgttgatggggtaagaggatcctgtactgagaagttgaccagagagggtctcaccatgcgcacagttccttctgtacctgtgtggaggaaaagtactgagtgaagggcagaaaaagagaaaacagaaatgctctgcccttggagaactgctaacctagggctactgttgattttgactatcttcttagtggccgaagcggagggtgctgctcaaccaaacaactcattaatgctgcaaactagcaaggagaatcatgctttagcttcaagcagtttatgtatggatgaaaaacagattacacagaactactcgaaagtactcgcagaagttaacacttcatggcctgtaaagatggctacaaatgctgtgctttgttgccctcctatcgcattaagaaatttgatcataataacatgggaaataatcctgagaggccagccttcctgcacaaaagcctacaagaaagaaacaaatgagaccaaggaaaccaactgtactgatgagagaataacctgggtctccagacctgatcagaattcggaccttcagattcgtaccgtggccatcactcatgacgggtattacagatgcataatggtaacacctgatgggaatttccatcgtggatatcacctccaagtgttagttacacctgaagtgaccctgtttcaaaacaggaatagaactgcagtatgcaaggcagttgcagggaagccagctgcgcatatctcctggatcccagagggcgattgtgccactaagcaagaatactggagcaatggcacagtgactgttaagagtacatgccactgggaggtccacaatgtgtctaccgtgacctgccacgtctcccatttgactggcaacaagagtctgtacatagagctacttcctgttccaggtgccaaaaaatcagcaaaattatatattccatatatcatccttactattattattttgaccatcgtgggattcatttggttgttgaaagtcaatggctgcagaaaatataaattgaataaaacagaatctactccagttgttgaggaggatgaaatgcagccctatgccagctacacagagaagaacaatcctctctatgatactacaaacaaggtgaaggcatctgaggcattacaaagtgaagttgacacagacctccatactttataagttgttggactctagtaccaagaaacaacaacaaacgagatacattataattactgtctgattttcttacagttctagaatgaagacttatattgaaattaggttttccaaggttcttagaagacattttaatggattctcattcatacccttgtataattggaatttttgattcttagctgctaccagctagttctctgaagaactgatgttattacaaagaaaatacatgcccatgaccaaatattcaaattgtgcaggacagtaaataatgaaaaccaaatttcctcaagaaataactgaagaaggagcaagtgtgaacagtttcttgtgtatcctttcagaatattttaatgtacatatgacatgtgtatatgcctatggtatatgtgtcaatttatgtgtccccttacatatacatgcacatatctttgtcaaggcaccagtgggaacaatacactgcattactgttctatacatatgaaaacctaataatataagtcttagagatcattttatatcatgacaagtagagctacctcattctttttaatggttatataaaattccattgtatagttatatcattatttaattaaaaacaaccctaatgatggatatttagattcttttaagttttgtttatttcttttaagttttgtttgtggtataaacaataccacatagaatgtttcttgtgcatatatctctttgtttttgagtatatctgtaggataactttcttgagtggaattgtcaggtcaaagggtttgtgcattttactattgatatatatgttaaattgtgtcaaatatatatgtcaaattccctccaacattgtttaaatgtgcctttccctaaatttctattttaataactgtactattcctgcttctacagttgccactttctctttttaatcaaccagattaaatatgatgtgagattataataagaattatactatttaataaaaatggatttatattttt

SEQ ID NO: 302 - protein, 348 aa, Homo Sapiens
MLCPWRTANLGLLLILTIFLVAEAEGAAQPNNSLMLQTSKENHALASSSLCMDEKQITQNYSKVLAEVNTSWPVKMATNAVLCCPPIALRNLIIITWEIILRGQPSCTKAYKKETNETKETNCTDERITWVSRPDQNSDLQIRTVAITHDGYYRCIMVTPDGNFHRGYHLQVLVTPEVTLFQNRNRTAVCKAVAGKPAAHISWIPEGDCATKQEYWSNGTVTVKSTCHWEVHNVSTVTCHVSHLTGNKSLYIELLPVPGAKKSAKLYIPYIILTIIILTIVGFIWLLKVNGCRKYKLNKTESTPVVEEDEMQPYASYTEKNNPLYDTTNKVKASEALQSEVDTDLHTL

SEQ ID NO: 303 - DNA, 3572 bp, Homo Sapiens
gcctttctggggcctgggggatcctcttgcactggtgggtggagagaagcgcctgcagccaaccagggtcaggctgtgctcacagtttcctctggcggcatgtaaaggctccacaaaggagttgggagttcaaatgaggctgctgcggacggcctgaggatggaccccaagccctggacctgccgagcgtggcactgaggcagcggctgacgctactgtgagggaaagaaggttgtgagcagccccgcaggacccctggccagccctggccccagcctctgccggagccctctgtggaggcagagccagtggagcccagtgaggcagggctgcttggcagccaccggcctgcaactcaggaacccctccagaggccatggacaggctgccccgctgacggccagggtgaagcatgtgaggagccgccccggagccaagcaggagggaagaggctttcatagattctattcacaaagaataaccaccattttgcaaggaccatgaggccactgtgcgtgacatgctggtggctcggactgctggctgccatgggagctgttgcaggccaggaggacggttttgagggcactgaggagggctcgccaagagagttcatttacctaaacaggtacaagcgggcgggcgagtcccaggacaagtgcacctacaccttcattgtgccccagcagcgggtcacgggtgccatctgcgtcaactccaaggagcctgaggtgcttctggagaaccgagtgcataagcaggagctagagctgctcaacaatgagctgctcaagcagaagcggcagatcgagacgctgcagcagctggtggaggtggacggcggcattgtgagcgaggtgaagctgctgcgcaaggagagccgcaacatgaactcgcgggtcacgcagctctacatgcagctcctgcacgagatcatccgcaagcgggacaacgcgttggagctctcccagctggagaacaggatcctgaaccagacagccgacatgctgcagctggccagcaagtacaaggacctggagcacaagtaccagcacctggccacactggcccacaaccaatcagagatcatcgcgcagcttgaggagcactgccagagggtgccctcggccaggcccgtcccccagccaccccccgctgccccgccccgggtctaccaaccacccacctacaaccgcatcatcaaccagatctctaccaacgagatccagagtgaccagaacctgaaggtgctgccaccccctctgcccactatgcccactctcaccagcctcccatcttccaccgacaagccgtcgggcccatggagagactgcctgcaggccctggaggatggccacgacaccagctccatctacctggtgaagccggagaacaccaaccgcctcatgcaggtgtggtgcgaccagagacacgaccccgggggctggaccgtcatccagagacgcctggatggctctgttaacttcttcaggaactgggagacgtacaagcaagggtttgggaacattgacggcgaatactggctgggcctggagaacatttactggctgacgaaccaaggcaactacaaactcctggtgaccatggaggactggtccggccgcaaagtctttgcagaatacgccagtttccgcctggaacctgagagcgagtattataagctgcggctggggcgctaccatggcaatgcgggtgactcctttacatggcacaacggcaagcagttcaccaccctggacagagatcatgatgtctacacaggaaactgtgcccactaccagaagggaggctggtggtataacgcctgtgcccactccaacctcaacggggtctggtaccgcgggggccattaccggagccgctaccaggacggagtctactgggctgagttccgaggaggctcttactcactcaagaaagtggtgatgatgatccgaccgaaccccaacaccttccactaagccagctccccctcctgacctctcgtggccattgccaggagcccaccctggtcacgctggccacagcacaaagaacaactcctcaccagttcatcctgaggctgggaggaccgggatgctggattctgttttccgaagtcactgcagcggatgatggaactgaatcgatacggtgttttctgtccctcctactttccttcacaccagacagcccctcatgtctccaggacaggacaggactacagacaactctttctttaaataaattaagtctctacaataaaaacacaactgcaaagtaccttcataatatacatgtgtatgagcctcccttgtgcacgtatgtgtataccacatatatatgcatttagatatacatcacatgtgatatatctagatccatatataggtttgccttagatacctaaatacacatatattcagttctcagatgttgaagctgtcaccagcagctttgctcttaggagaaaagcatttcattagtgttgtattacttgagtctaagggtagatcacagactgtgtggtctcaactgaaaggatcacccttggcatctgtgtgcctggattcttccagaatgtctacaatgctaatctctcacatagaggttcccagcttcttaagaaccccttttggcacctaatcaaatttcaaaatccctccccccacattttcatacttttccccattctcaggacttttcaccatccatcacccacttatcccttcatttgacaccattcattaagtgccttctgtgtgtcagtccctggccactcactgcagttcaaggccccctttccgctctgctgtactcctcgcctacctactccttgccttttctgtcgcacagccccttctttccaggcgagattcctcagcttctgagtaggaaacactccgggctccaggtttctggttgggaagggaaggccaggccaaaagctccaccggccgtatagataatgtactcgcagttttgtatcttccattcatactttaacctacaggtcatttgagtcttcacacaaataataacctatctggccaggagaattatctcagaacagaagtcatcagatcatcagagcccccagatggctacagaccagagattccacgctctcaggctgactagagtccgcatctcatctccaaactacacttccctggagaacaagtgccacaaaaatgaaaacaggccacttctcaggagttgaataatcaggggtcaccggaccccttggttgatgcactgcagcatggtggctttctgagtcctgttggccaccaagtgtcagcctcagcactcccgggactattgccaagaaggggcaagggatgagtcaagaaggtgagacccttcccggtgggcacgtgggccaggctgtgtgagatgttggatgtttggtactgtccatgtctgggtgtgtgcctattacctcagcatttctcacaaagtgtaccatgtagcatgttttgtgtatataaaagggagggtttttttaaaaatatattcccagattatccttgtaatgacacgaatctgcaataaaagccatcagtgct

SEQ ID NO: 304 - protein, 493 aa, Homo Sapiens
MRPLCVTCWWLGLLAAMGAVAGQEDGFEGTEEGSPREFIYLNRYKRAGESQDKCTYTFIVPQQRVTGAICVNSKEPEVLLENRVHKQELELLNNELLKQKRQIETLQQLVEVDGGIVSEVKLLRKESRNMNSRVTQLYMQLLHEIIRKRDNALELSQLENRILNQTADMLQLASKYKDLEHKYQHLATLAHNQSEIIAQLEEHCQRVPSARPVPQPPPAAPPRVYQPPTYNRIINQISTNEIQSDQNLKVLPPPLPTMPTLTSLPSSTDKPSGPWRDCLQALEDGHDTSSIYLVKPENTNRLMQVWCDQRHDPGGWTVIQRRLDGSVNFFRNWETYKQGFGNIDGEYWLGLENIYWLTNQGNYKLLVTMEDWSGRKVFAEYASFRLEPESEYYKLRLGRYHGNAGDSFTWHNGKQFTTLDRDHDVYTGNCAHYQKGGWWYNACAHSNLNGVWYRGGHYRSRYQDGVYWAEFRGGSYSLKKVVMMIRPNPNTFH

SEQ ID NO: 305 - DNA, 1074 bp, Homo Sapiens
gatcaacacatttcatctgggcttcttaaatctaaatctttaaaatgactaagttttcttccttttctctgtttttcctaatagttggggcttatatgactcatgtgtgtttcaatatggaaattattggagggaaagaagtgtcacctcattccaggccatttatggcctccatccagtatggcggacatcacgtttgtggaggtgttctgattgatccacagtgggtgctgacagcagcccactgccaatatcggtttaccaaaggccagtctcccactgtggttttaggcgcacactctctctcaaagaatgaggcctccaaacaaacactggagatcaaaaaatttataccattctcaagagttacatcagatcctcaatcaaatgatatcatgctggttaagcttcaaacagccgcaaaactcaataaacatgtcaagatgctccacataagatccaaaacctctcttagatctggaaccaaatgcaaggttactggctggggagccaccgatccagattcattaagaccttctgacaccctgcgagaagtcactgttactgtcctaagtcgaaaactttgcaacagccaaagttactacaacggcgacccttttatcaccaaagacatggtctgtgcaggagatgccaaaggccagaaggattcctgtaagggtgactcagggggccccttgatctgtaaaggtgtcttccacgctatagtctctggaggtcatgaatgtggtgttgccacaaagcctggaatctacaccctgttaaccaagaaataccagacttggatcaaaagcaaccttgtcccgcctcatacaaattaagttacaaataattttattggatgcacttgcttcttttttcctaatatgctcgcaggttagagttgggtgtaagtaaagcagagcacatatggggtccatttttgcacttgtaagtcattttattaaggaatcaagttctttttcacttgtatcactgatgtatttctaccatgctggttttattctaaataaaatttagaagactcaaaaaaaaaaaaaaaaaaaaaaaaaaaaa

SEQ ID NO: 306 - protein, 264 aa, Homo Sapiens
MTKFSSFSLFFLIVGAYMTHVCFNMEIIGGKEVSPHSRPFMASIQYGGHHVCGGVLIDPQWVLTAAHCQYRFTKGQSPTVVLGAHSLSKNEASKQTLEIKKFIPFSRVTSDPQSNDIMLVKLQTAAKLNKHVKMLHIRSKTSLRSGTKCKVTGWGATDPDSLRPSDTLREVTVTVLSRKLCNSQSYYNGDPFITKDMVCAGDAKGQKDSCKGDSGGPLICKGVFHAIVSGGHECGVATKPGIYTLLTKKYQTWIKSNLVPPHTN

SEQ ID NO: 307 - DNA, 2918 bp, Homo Sapiens
gcggccgcctgcgcgctggccgcctgcgcgctgccagcccgcccgcccgccaggggctccgccgccctcgcctcggcctcgttagcccgccaggagccccgcagctcctccgggagcccgctggtaactcgcgtccctcgcgcttctccggcgcctgaggggcccgcctcgggccatggtgctctcccaggaggagccggactccgcgcggggcacgagcgaggcgcagccgctcggccccgcgcccacgggggccgctccgccgcccggcccgggaccctcggacagccccgaggcggctgtcgagaaggtggaggtggagctggcggggccggcgaccgcggagccccatgagccccccgaaccccccgagggcggctggggctggctggtgatgctggcggccatgtggtgcaacgggtcggtgttcggcatccagaacgcttgcggggtgctcttcgtgtccatgctggaaaccttcggctccaaagacgatgacaagatggtctttaagacagcatgggtaggttctctctccatggggatgattttcttttgctgcccaatagtcagcgtcttcacagacctatttggttgtcggaaaacagctgtcgtgggtgctgctgttggatttgttgggctcatgtccagttcttttgtaagttccatcgagcctctgtaccttacctatggaatcatatttgcctgcggctgctcctttgcataccagccttcattggtcattttgggacactatttcaagaagcgccttggactggtgaatggcattgtcactgctggcagcagtgtcttcacaatcctgctgcctttgctcttaagggttctgattgacagcgtgggcctcttttacacattgagggtgctctgcatcttcatgtttgttctctttctggctggctttacttaccgacctcttgctaccagtaccaaagataaagagagtggaggtagcggatcctccctcttttccaggaaaaagttcagtcctccaaaaaaaattttcaattttgccatcttcaaggtgacagcttatgcagtgtgggcagttggaataccacttgcactttttggatactttgtgccttatgttcacttgatgaaacatgtaaatgaaagatttcaagatgaaaaaaataaagaggttgttctcatgtgcattggcgtcacttcaggagttggacgactgctctttggccggattgcagattatgtgcctggtgtgaagaaggtttatctacaggtactctcctttttcttcattggtctgatgtccatgatgattcctctgtgtagcatctttggggccctcattgctgtgtgcctcatcatgggtctcttcgatggatgcttcatttccattatggctcccatagcctttgagttagttggtgcccaggatgtctcccaagcaattggatttctgctcggattcatgtctatacccatgactgttggcccacccattgcagggttacttcgtgacaaactgggctcctatgatgtggcattctacctcgctggagtccctccccttattggaggtgctgtgctttgttttatcccgtggatccatagtaagaagcaaagagagatcagtaaaaccactggaaaagaaaagatggagaaaatgttggaaaaccagaactctctgctgtcaagttcatctggaatgttcaagaaagaatctgactctattatttaatatcttacatacctccaccagactggacttgctttttgaattttaagcaagtttcctttccttttatacaaattgcaaatttcatatttttttaatcacatcctaggaatagcacaataattgggaaatagaacccttatcactagaagaaccattttctgccactaaatatctctgatgtttccatgagtctgagggcagagactctggtatatgaaaacgtctgaaagtcacatattgtgaaaatttgaagctatctcagtaaaaagcagctttggaaactgtgaatgatctttagcttgtacaaatgtttaaaaatacctcaggctatactgaaagggttgcagtttggttaggagtggaaatattttgtttgttaatgatgtcttcagttctggtacctctgttttactttcttatgctctttggaaactttttgcaaaatttaagcctgggttctagataataccagatctacctaaacctcaagtctatgttaaagttgctttcctgctgttaaataagctatgatattaagatattctgacttgctccagtgtcaagggaccttctgggagcaggtgctaacatagtgttcagaatcaatatgtgagatgaaaaggatcccctccaggaggatcctgagctgttcagaaatcatttaagtttacagcgttgttccctttgcgtttgcagtgcgttttactcaagtagccagaaacaccccacgtttctgaatttgtttaaactgtaacaataaagtaaaatagaatgcatgaaagatattctggcgattgtaacttagaatttttctgacttctggatttgttggcactagaacctgatatttaaagtcttactgagcagctatcaagtggcagttacaggcacaaattggtggaggctggaggatggggaggggagcaaaaccctttatatttgtgaagaaaatatctgtagctgatagaaataattgcttaaattggtttatgaaattaatgagtctgaaaaggttaaaagcacttataaaaagaaccaagtcctacatttccagaactttctggcaaaaatttgcactcatattatttatcctatgaacattcccattgtttttttttgctatttatatacagattatcataagaaagctctcagtttgaggacccaaaaaaaaaaaaaaaaaaaaaaaaaaaaa

SEQ ID NO: 308 - protein, 515 aa, Homo Sapiens
MVLSQEEPDSARGTSEAQPLGPAPTGAAPPPGPGPSDSPEAAVEKVEVELAGPATAEPHEPPEPPEGGWGWLVMLAAMWCNGSVFGIQNACGVLFVSMLETFGSKDDDKMVFKTAWVGSLSMGMIFFCCPIVSVFTDLFGCRKTAVVGAAVGFVGLMSSSFVSSIEPLYLTYGIIFACGCSFAYQPSLVILGHYFKKRLGLVNGIVTAGSSVFTILLPLLLRVLIDSVGLFYTLRVLCIFMFVLFLAGFTYRPLATSTKDKESGGSGSSLFSRKKFSPPKKIFNFAIFKVTAYAVWAVGIPLALFGYFVPYVHLMKHVNERFQDEKNKEVVLMCIGVTSGVGRLLFGRIADYVPGVKKVYLQVLSFFFIGLMSMMIPLCSIFGALIAVCLIMGLFDGCFISIMAPIAFELVGAQDVSQAIGFLLGFMSIPMTVGPPIAGLLRDKLGSYDVAFYLAGVPPLIGGAVLCFIPWIHSKKQREISKTTGKEKMEKMLENQNSLLSSSSGMFKKESDSII

SEQ ID NO: 309 - DNA, 4304 bp, Homo Sapiens
cttgggcgttggaccccgcatcttattagcaaccagggagatttctccattttcctcttgtctacagtgcggctacaaatctgggatttttttattacttctttttttttcgaactacacttgggctcctttttttgtgctcgacttttccaccctttttccctccctcctgtgctgctgctttttgatctcttcgactaaaatttttttatccggagtgtatttaatcggttctgttctgtcctctccaccacccccacccccctccctccggtgtgtgtgccgctgccgctgttgccgccgccgctgctgctgctcgccccgtcgttacaccaacccgaggctctttgtttcccctcttggatctgttgagtttctttgttgaagaagccagcatgggtgcccagttctccaagaccgcagcgaagggagaagccgccgcggagaggcctggggaggcggctgtggcctcgtcgccttccaaagcgaacggacaggagaatggccacgtgaaggtaaacggcgacgcttcgcccgcggccgccgagtcgggcgccaaggaggagctgcaggccaacggcagcgccccggccgccgacaaggaggagcccgcggccgccgggagcggggcggcgtcgccctccgcggccgagaaaggtgagccggccgccgccgctgcccccgaggccggggccagcccggtagagaaggaggcccccgcggaaggcgaggctgccgagcccggctcgcccacggccgcggagggagaggccgcgtcggccgcctcctcgacttcttcgcccaaggccgaggacggggccacgccctcgcccagcaacgagaccccgaaaaaaaaaaagaagcgcttttccttcaagaagtctttcaagctgagcggcttctccttcaagaagaacaagaaggaggctggagaaggcggtgaggctgaggcgcccgctgccgaaggcggcaaggacgaggccgccgggggcgcagctgcggccgccgccgaggcgggcgcggcctccggggagcaggcagcggcgccgggcgaggaggcggcagcgggcgaggagggggcggcgggtggcgacccgcaggaggccaagccccaggaggccgctgtcgcgccagagaagccgcccgccagcgacgagaccaaggccgccgaggagcccagcaaggtggaggagaaaaaggccgaggaggccggggccagcgccgccgcctgcgaggccccctccgccgccgggcccggcgcgcccccggagcaggaggcagcccccgcggaggagcccgcggccgccgcagcctcgtcagcctgcgcagccccctcacaggaggcccagcccgagtgcagtccagaagcccccccagcggaggcggcagagtaaaagagcaagcttttgtgagataatcgaagaacttttctcccccgtttgtttgttggagtggtgccaggtactggttttggagaacttgtctacaaccagggattgattttaaagatgtctttttttattttacttttttttaagcaccaaattttgttgttttttttttttctcccctccccacagatcccatctcaaatcattctgttaaccaccattccaacaggtcgaggagagcttaaacaccttcttcctctgccttgtttctcttttattttttattttttcgcatcagtattaatgtttttgcatactttgcatctttattcaaaagtgtaaactttctttgtcaatctatggacatgcccatatatgaaggagatgggtgggtcaaaaagggatatcaaatgaagtgataggggtcacaatggggaaattgaagtggtgcataacattgccaaaatagtgtgccactagaaatggtgtaaaggctgtcttttttttttttttttaaagaaaagttattaccatgtattttgtgaggcaggtttacaacactacaagtcttgagttaagaaggaaagaggaaaaaagaaaaaacaccaatacccagatttaaaaaaaaaaaaacgatcatagtcttaggagttcatttaaaccataggaacttttcacttatctcatgttagctgtaccagtcagtgattaagtagaactacaagttgtataggctttattgtttattgctggtttatgaccttaataaagtgtaattatgtattaccagcagggtgtttttaactgtgactattgtataaaaacaaatcttgatatccagaagcacatgaagtttgcaactttccaccctgcccatttttgtaaaactgcagtcatcttggaccttttaaaacacaaattttaaactcaaccaagctgtgataagtggaatggttactgtttatactgtggtatgtttttgattacagcagataatgctttcttttccagtcgtctttgagaataaaggaaaaaaaaatcttcagatgcaatggttttgtgtagcatcttgtctatcatgttttgtaaatactggagaagctttgaccaatttgacttagagatggaatgtaactttgcttacaaaaattgctattaaactcctgcttaaggtgttctaattttctgtgagcacactaaaagcgaaaaataaatgtgaataaaatgtacaaatttgttgtgtttttttatgttctaataatactgagacttctaggtcttaggttaatttttaggaagatcttgcatgccatcaggagtaaattttattgtggttcttaatctgaagttttcaagctctgaaattcataatccgcagtgtcagattacgtagaggaagatcttacaacattccatgtcaaatctgttaccatttattggcatttagttttcatttaagaattgaacataattatttttattgtagctatatagcatgtcagattaaatcatttacaacaaaaggggtgtgaacctaagactatttaaatgtcttatgagaaaatttcataaagccattctcttgtcattcaggtccagaaacaaattttaaactgagtgagagtctatagaatccatactgcagatgggtcatgaaatgtgaccaaatgtgtttcaaaaattgatggtgtattacctgctattgtaattgcttagtgcttggctaatttccaaattattgcataatatgttctaccttaagaaaacaggtttatgtaacaaagtaatggtgttgaatggatgatgtcagttcatgggcctttagcatagttttaagcatcatttttttttttttttttgaaagtgtgttagcatcttgttactcaaaggataagacagacaataatacttcactgaatattaataatctttactagtttacctcctctgctctttgccacccgataactggatatcttttccttcaaaggaccctaaactgattgaaatttaagatatgtatcaaaaacattatttcatttaatgcacatctgttttgctgtttttgagcagtgtgcagtttagggttcatgataaatcattgaaccacatgtgtaacaactgaatgccaaatcttaaactcattagaaaaataacaaattaggttttgacacgcattcttaattggaataatggatcaaaaatagtggttcatgaccttaccaaacacccttgctactaataaaatcaaataacacttagaagggtatgtatttttagttagggtttcttgatcttggaggatgtttgaaagttaaaaattgaatttggtaaccaaaggactgatttatgggtctttcctatcttaaccaacgttttcttagttacctagatggccaagtacagtgcctggtatgtagtaagactcagtaaaaaagtggatttttaaaaataactcccaaagtgaatagtcaaaaatcctgttagcaaactgttatatattgctaagtttgttcttttaacagctggaatttattaagatgcattattttgattttattcactgcctaaaacactttgggtggtattgatggagttggtggattttcctccaagtgattaaatgaaatttgacgtatcttttcatccaaagttttgtacatcatgttttctaacggaaaaaaatgttaatatggcttttttgtattactaaaaatagctttgagattaaggaaaaataaataactcttgtacagttcagtattgtctattaaatctgtattggcagtatgtataatggcatttgctgtggttacaaaatacttcctctgggttataataatcatttgatccaattcctattgcttgtaaaataaagttttaccagttgatataatcaaaaaaaaaaaaaaa

SEQ ID NO: 310 - protein, 332 aa, Homo Sapiens
MGAQFSKTAAKGEAAAERPGEAAVASSPSKANGQENGHVKVNGDASPAAAESGAKEELQANGSAPAADKEEPAAAGSGAASPSAAEKGEPAAAAAPEAGASPVEKEAPAEGEAAEPGSPTAAEGEAASAASSTSSPKAEDGATPSPSNETPKKKKKRFSFKKSFKLSGFSFKKNKKEAGEGGEAEAPAAEGGKDEAAGGAAAAAAEAGAASGEQAAAPGEEAAAGEEGAAGGDPQEAKPQEAAVAPEKPPASDETKAAEEPSKVEEKKAEEAGASAAACEAPSAAGPGAPPEQEAAPAEEPAAAAASSACAAPSQEAQPECSPEAPPAEAAE

SEQ ID NO: 311 - DNA, 1866 bp, Homo Sapiens
gcattgctacctgcccttctcaaagcccacatgttgtattttatgcaaatctacagattatctatcattatctaaatgcaggcatctgaaaaccagcagtaatcctgcctctgaagtttatcaggaaaggagcttaaaagagaaccaaattcagcctgtgttggaactctcagtcccagaggggtgtggtttgtagctctccggcctgctgttggacttaggctgtgacccacagaaggacgccagaaagtactcaagacattcacggtgccccggtcagcactcgccatgacgaagacttctacatgcatataccacttccttgttctgagctggtatactttcctcaattattacatctcacaggaaggaaaagacgaggtgaaacccaaaatcttggcaaatggtgcaaggtggaaatatatgacgctgcttaatctgctcaagaacaggactgctgggtttgacatctaccagccaggaagctttaggcagctcttgcagaccattttctacggggtcacctgcctggatgatgtgctgaaaagaaccaaagggggaaaagacattaagttcctaactgccttcagagacctgcttttcaccactctggcttttcctgtatccacgtttgtatttttggcattctggatcctctttctctacaatcgagatctcatttaccccaaggtcctagatactgtcatccccgtgtggctgaatcatgcaatgcacactttcatattccccatcacattggctgaagtcgtcctcaggcctcactcctatccatcaaagaagacaggactcaccttgctggctgctgccagcattgcttacatcagccgcatcctatggctctactttgagacgggtacctgggtgtatcctgtgtttgccaaactcagcctcttgggtctagcagctttcttctctctcagctacgtcttcatcgccagcatctacctacttggagagaagctcaaccactggaaatggggtgacatgaggcagccacggaagaagaggaagtaattgcacaccattttccaagaaccaagaaagaagaaaacacaagagatttttctcatcttttttttttttttctggtggagggaggtggtggaggaacatagcaaagtaggagggacagagagtgatacttaaatttaataagaggttcgtgaaggtagcttaacttgagaactcttggttttttgaaaggttgactgcacatgccaaaaacaactcctgctatctcagaattaattatctttgaccttcgtggaggatggtctctggttaaaatctggccaaagaaactcacataaacttggtgttagagaacatctagagagagagagaggaacttagagtcatttaaactcttcagtttacagagaaggatgctgaggacctagatgagaagttacctgcaaaaggcaaaagggttacttagtgtcagaaccaaggcaatgacttctctctcccagatctcctagctactggtcctgggccatttttttttttttaaataatcccaactttctttaaaagacaagcatttcagtaagctagttattttcatgggttgctcatccatttttttcagtgatctaaaaatgtagggagatggctactactgaagttgtctgtctacttgggataatagcaaattaattgaagacaatgggaaagtaagttataaaaaatactgggaaatctgtttctcttctgagcaagcattcagggcaggtataaacatcaaacatagtgacattgtcaaaacctcttccatttgaacattgattaattcatcaaataaatggtatagtaataaattttgcttgcagaagaaaaaaaaaa

SEQ ID NO: 312 - protein, 248 aa, Homo Sapiens
MTKTSTCIYHFLVLSWYTFLNYYISQEGKDEVKPKILANGARWKYMTLLNLLKNRTAGFDIYQPGSFRQLLQTIFYGVTCLDDVLKRTKGGKDIKFLTAFRDLLFTTLAFPVSTFVFLAFWILFLYNRDLIYPKVLDTVIPVWLNHAMHTFIFPITLAEVVLRPHSYPSKKTGLTLLAAASIAYISRILWLYFETGTWVYPVFAKLSLLGLAAFFSLSYVFIASIYLLGEKLNHWKWGDMRQPRKKRK

SEQ ID NO: 313 - DNA, 6531 bp, Homo Sapiens
gcccagccagcttgcgtcaccgcttcagagcggagaagagcgagcaggggagagcgagaccagttttaaggggaggaccggtgcgagtgaggcagccccgaggctctgctcgcccaccacccaatcctcgcctcccttctgctccaccttctctctctgccctcacctctcccccgaaaaccccctatttagccaaaggaaggaggtcaggggaacgctctcccctccccttccaaaaaacaaaaacagaaaaacccttttccaggccggggaaagcaggagggagaggggccgccgggctggccatggagctgctgtgccacgaggtggacccggtccgcagggccgtgcgggaccgcaacctgctccgagacgaccgcgtcctgcagaacctgctcaccatcgaggagcgctaccttccgcagtgctcctacttcaagtgcgtgcagaaggacatccaaccctacatgcgcagaatggtggccacctggatgctggaggtctgtgaggaacagaagtgcgaagaagaggtcttccctctggccatgaattacctggaccgtttcttggctggggtcccgactccgaagtcccatctgcaactcctgggtgctgtctgcatgttcctggcctccaaactcaaagagaccagcccgctgaccgcggagaagctgtgcatttacaccgacaactccatcaagcctcaggagctgctggagtgggaactggtggtgctggggaagttgaagtggaacctggcagctgtcactcctcatgacttcattgagcacatcttgcgcaagctgccccagcagcgggagaagctgtctctgatccgcaagcatgctcagaccttcattgctctgtgtgccaccgactttaagtttgccatgtacccaccgtcgatgatcgcaactggaagtgtgggagcagccatctgtgggctccagcaggatgaggaagtgagctcgctcacttgtgatgccctgactgagctgctggctaagatcaccaacacagacgtggattgtctcaaagcttgccaggagcagattgaggcggtgctcctcaatagcctgcagcagtaccgtcaggaccaacgtgacggatccaagtcggaggatgaactggaccaagccagcacccctacagacgtgcgggatatcgacctgtgaggatgccagttgggccgaaagagagagacgcgtccataatctggtctcttcttctttctggttgtttttgttctttgtgttttagggtgaaacttaaaaaaaaaattctgcccccacctagatcatatttaaagatcttttagaagtgagagaaaaaggtcctacgaaaacggaataataaaaagcatttggtgcctatttgaagtacagcataagggaatcccttgtatatgcgaacagttattgtttgattatgtaaaagtaatagtaaaatgcttacaggaaaacctgcagagtagttagagaatatgtatgcctgcaatatgggaacaaattagaggagacttttttttttcatgttatgagctagcacatacacccccttgtagtataatttcaaggaactgtgtacgccatttatggcatgattagattgcaaagcaatgaactcaagaaggaattgaaataaggagggacatgatggggaaggagtacaaaacaatctctcaacatgattgaaccatttgggatggagaagcacctttgctctcagccacctgttactaagtcaggagtgtagttggatctctacattaatgtcctcttgctgtctacagtagctgctacctaaaaaaagatgttttattttgccagttggacacaggtgattggctcctgggtttcatgttctgtgacatcctgcttcttcttccaaatgcagttcattgcagacaccaccatattgctatctaatggggaaatgtagctatgggccataaccaaaactcacatgaaacggaggcagatggagaccaagggtgggatccagaatggagtcttttctgttattgtatttaaaagggtaatgtggccttggcatttcttcttagaaaaaaactaatttttggtgctgattggcatgtctggttcacagtttagcattgttataaaccattccattcgaaaagcactttgaaaaattgttcccgagcgatagatgggatggtttatgcaagtcatgctgaatactcctcccctcttctcttttgccccctcccttcctgcccccagtctgggttactcttcgcttctggtatctggcgttctttggtacacagttctggtgttcctaccaggactcaagagacaccccttcctgctgacattcccatcacaacattcctcagacaagcctgtaaactaaaatctgttaccattctgatggcacagaaggatcttaattcccatctctatacttctcctttggacatggaaagaaaagttattgctggtgcaaagatagatggctgaacatcagggtgtggcattttgttcccttttccgtttttttttttttattgttgttgttaattttattgcaaagttgtattcagcgtacttgaatttttcttcctctccacttcttagaggcattcagttagcaaagaggttggagcaacaacttttttttttttttttgcacaattgtaattgacaggtaatgaagctatttgttaaaatatttgcctttttaagtaaaaaagaaaaatcagaacagggctatttgaagaattattttatacacagattctgccttgtttcatagtatgagggttgaagacggaaaacaatctaagggtctctcatttttttaattttgttttgttcagtttggtttttttttttttttgcgctgctaagaagctaaagtcatccatccttattcacgttgacagtacctagctgtaatgtttcacagagtgtgctgctattttataaacatttttataatatattattttactgcttaaattccaagtcctgaagtagatggttgagatatgagttcttcgtactggaaaagcccttccgtagtttgttttcttctggtagcatattcatggttgtttttttttttcttttttggttttttggttttttttttttcctctgatcacattcttcaaagacggagtattctttacctcaggtttactggacaaaatcaataactacaaaaggcaatgattcacgcttttgttttcataatacctcacaaccgtacagtttctgcttgggagcccattcgcatgaggaatacagaagcagtgtgagcagggctgactccctctcaggtggaaggcagggcggtctcactcccagggacctttttggtcatggaggccatcgggctcccagttagaccctggtatcctcatcatgatggaaaaaatacattgaaccaagggatcctccctccccttcaaggcagacgttcagtacaaacatttatgcggtaggctcagatgtcgtaatttgcacttaggtaccaggtgtcaggaaacagactaaaaagaattccaccaggctgtttggagatcctcatcttggagctttttcaaaagcggggcttcatctgcaaagggccctttcatcttgaagtttttcccctccgtctttcccctcccctggcatggacaccttgtgtttaggatcatctctgcaggtttcctaggtctgaatctgcgagtagatgaacctgcagcaagcagcgtttatggtgcttccttctccctcctctgtctcaaactgcgcaggcaagcactatgcaagcccaggccctctgctgagcggtactaaacggtcgggttttcaatcacactgaattggcaggataagaaaaataggtcagataagtatgggatgatagttgaagggaggtgaagaggctgcttctctacagaggtgaaattccagatgagtcagtctcttgggaagtgtgtttagaagggttcaggactttgtgagttagcatgaccctaaaattctaggggatttctggtgggacaatgggtggtgaattctgaagttttggagagggaagtggagcagccagcaagtaagctagccagagttttctcaagagccagctttgctcagcacactctcctgggccccaaggagtcccacggaatggggaaagcgggaaccctggagttcttgggaatcttggagcctaaagagaaaccgaggtgcaaattcatttcatggtgactgacccttgagcttaaacagaagcagcaaatgaaagaaccggacaaataaggaagggcacaagcctacccgactctatttacagtctgtaactttccactcttcctgtagtcccgaggcccctgggtccttctagcttttctctttcccatccttggggccttgtgtgatgatgggtgtggggctgccgatgggaaagtcgggggttgttaggcttttctgcctgctcctgcttaaacacaagaaggaatcctggattttgccctctccttagctcttagtctctttggtaggagttttgttccagaggagctctcccccttggatttgaacttgctctttttgttgttgttgttctttctcttctttttcttacctcccactaaaggggttccaaattatcctggtctttttctaccttgttgtgtttctatctcgtctttacttccatctgtttgtttttttctccatcagtgggggccgagttgttcccccagcctgccaaattttgatccttcccctcttttggccaaatcctagggggaagaaatcctagtatgccaaaaatatatgctaagcataattaaactccatgcgggtccataacagccaagaagcctgcaggagaaagccaagggcagttccctccgcagaacaccccatgcgtgctgagaggcgagctccttgaagaaggggctgttcttccaggaggccttattttgaactgcctcaggaccccactggagagcacagcatgccttactactgggtcatccttggtctatgtgctctgtactggaggctctgttctgcctcttatcagccaggtcaggggcacacatggcttaagtgacaaagccagaggagaagacaaccctgacagcatcacgctgcatcccattgctagcaggattggcaactcttcagacggagctgcgcttccctgcagtctagcacctctagggcctctccagactgtgccctgggagctctgggactgaaaggttaagaacataaggcaggatcagatgactctctccaagagggcaggggaattttctctccatgggccacaggggacagggctgggagaagaaatagacttgcaccttatgtcatgtaaataattgattttctagttcaagaagataatattggtagtgtgggaattggaggtaggaaggggaggaagtctgagtaagccagttggcttctaagccaaaaggattcctctttgtttatctctgagacagtccaaccttgagaatagctttaaaagggaaattaatgctgagatgataaagtccccttaagccaacaaaccctctgtagctatagaatgagtgcaggtttctattggtgtggactcagagcaatttacaagagctgttcatgcagccatccatttgtgcaaaatagggtaagaagattcaagaggatatttattacttcctcataccacatggcttttgatgattctggattctaaacaacccagaatggtcatttcaggcacaacgatactacattcgtgtgtgtctgcttttaaacttggctgggctatcagaccctattctcggctcaggttttgagaagccatcagcaaatgtgtacgtgcatgctgtagctgcagcctgcatcccttcgcctgcagcctactttggggaaataaagtgccttactgactgtagccattacagtatccaatgtcttttgacaggtgcctgtccttgaaaaacaaagtttctatttttatttttaattggtttagttcttaactgctggccaactcttacatccccagcaaatcatcgggccattggattttttccattatgttcatcacccttatatcatgtacctcagatctctctctctctcctctctctcagttatgtagtttcttgtcttggacttttttttttcttttctttttctttttttttttgctttaaaacaagtgtgatgccatatcaagtccatgttattctctcacagtgtactctataagaggtgtgggtgtctgtttggtcaggatgttagaaagtgctgataagtagcatgatcagtgtatgcgaaaaggtttttaggaagtatggcaaaaatgttgtattggctatgatggtgacatgatatagtcagctgccttttaagaggtcttatctgttcagtgttaagtgatttaaaaaaataataacctgttttctgactagtttaaagatggatttgaaaatggttttgaatgcaattaggttatgctatttggacaataaactcaccttgacctaaattaaaaaaaaaa

SEQ ID NO: 314 - protein, 289 aa, Homo Sapiens
MELLCHEVDPVRRAVRDRNLLRDDRVLQNLLTIEERYLPQCSYFKCVQKDIQPYMRRMVATWMLEVCEEQKCEEEVFPLAMNYLDRFLAGVPTPKSHLQLLGAVCMFLASKLKETSPLTAEKLCIYTDNSIKPQELLEWELVVLGKLKWNLAAVTPHDFIEHILRKLPQQREKLSLIRKHAQTFIALCATDFKFAMYPPSMIATGSVGAAICGLQQDEEVSSLTCDALTELLAKITNTDVDCLKACQEQIEAVLLNSLQQYRQDQRDGSKSEDELDQASTPTDVRDIDL

SEQ ID NO: 315 - DNA, 3296 bp, Homo Sapiens
ccggcaccgacaagtgcgctgcaccagtggcaccggctgggggcgagccgacctcgagcagccgccgccgccgccgtcgttgctactgccgcagcggagttcagagggcccggaggtgggagacttcccacacggtgactgagatgtcgtccactgcggctttttaccttctctctacgctaggaggatacttggtgacctcattcttgttgcttaaatacccgaccttgctgcaccagagaaagaagcagcgattcctcagtaaacacatctctcaccgcggaggtgctggagaaaatttggagaatacaatggcagcctttcagcatgcggttaaaatcggaactgatatgctagaattggactgccatatcacaaaagatgaacaagttgtagtgtcacatgatgagaatctaaagagagcaactggggtcaatgtaaacatctctgatctcaaatactgtgagctcccaccttaccttggcaaactggatgtctcatttcaaagagcatgccagtgtgaaggaaaagataaccgaattccattactgaaggaagtttttgaggcctttcctaacactcccattaacatcgatatcaaagtcaacaacaatgtgctgattaagaaggtttcagagttggtgaagcggtataatcgagaacacttaacagtgtggggtaatgccaattatgaaattgtagaaaagtgctacaaagagaattcagatattcctatactcttcagtctacaacgtgtcctgctcattcttggccttttcttcactggcctcttgccctttgtgcccattcgagaacagttttttgaaatcccaatgccttctattatactgaagctaaaagaaccacacaccatgtccagaagtcaaaagtttctcatctggctttctgatctcttactaatgaggaaagctttgtttgaccacctaactgctcgaggcattcaagtgtatatttgggtattaaatgaagaacaagaatacaaaagagcttttgatttgggagcaactggggtgatgacagactatccaacaaagcttagggattttttacataacttttcagcatagaaaaagaggtacttagaagtattgaaggaaaaaatgaagacctaagaaaaaaatatttcatgatcatttccctaagccatttccagaatggtaaaaggtttaatcagtttttattacctcatttttaagcctgtatgagaatgtagaaactatatattatatgtatatttattttaaataatattgtatattttatgtttgtaaattgtttagaaagataattggttatgagatgtaagttttaatttcttaatgtgcatttttgtttctagatcttatacagaaatcttgattaataacatacacagaaatgtacatactacatcatctacagaaatcttgatcaataacctagaaactaggttatctaggttattgatcaagatttctgtagatgatgcagtgttctatcataagtaattctggaatcaaagactattggatacatttggcattgggctgagtgtggtggctcatgcctgtaatcccagcactttgggaggctgagacaggcggatcatctgaagtcaggagttaaagaccagcctggccaacatggcaaaaccccatctctaccaaaaatacaaaaattaaccatgcgtggtggtacacgtctgtcatcccagcagctcttaaggctgaggcacaagaattgcttgaacccgggaggcagaggctgtagtgagccaagatagcaccactgcactccagcctgggagacagagtgagactccgtctcaaaaaaaaaaaaaaaaaaaaaaaatgggaggccgaggcgggcggatcacgaggtcaggagatcgagaccatcctggctaacatggtgaaaccccgtctctactaaaaatacaaaaaattagctgggcgtggtggtgggcaccttagtcccagctactcgggaggctgagtcaggagaatggcgtgaacccgggaggcggagcttgcagtgagccgagatcgcgccactgcactccagcctgggctacagagcaagactccgtctcaaaaaaagaaaaaaagaaaaaaaattggcaatagtcttcactggaatacaatcaattagtaaaagattttttttttttttttgacatgtagtcttgctctgtcgccgaggccggagtgcagtggtgcgatcttggctcactgcaacctctgcctcccaggttccagcaattctcctgcctctgcctcccgagtacctgggattacaggtgcctgctaccatgcccagctaatttttgtatttttagtagagacagggttttgccacgttggccagactggtctcgaactcctgacctcaggtgatccacccacctcggcctctcaaagtgctgggattacaggtttgaaccactgcacccggccagtaaaagaaattttgaaggccattgcagctatttggtagtgtcttgttatttctaggtgtaccttagttaaagaggaaaaataaaacggaaaaaagcttggaaatcagtgatgtgtagttatttggcaagttatacataatcagcagcagccaggctcaagaaaataaaagttgattagttgatcagaaataaaatctgtagagtgaattagatttctgagttgttgttgttaatggaacattctatttgagacctttttcaggtgtgtagcaattctaccatgtccatttttttaagcattaaaaaggaacttaccagttgtaaattaagacaagatccaaatagtcatatttttgtgtttcctctaaaaaaatgtaagatttccatttttggcactgactaactgagcctacatctagattttaaataccatcttgaatcctaataattaaactgatgaaagtgcatatcattgttcctaacatttatgaacccccataaagatgttcctgatctttaaaactcattaatctgagtattaagtagaaacagaattttccaaagcattagacatcactttctcagtttatctgaggtgacttcgtgtacatctgtttctaatatatttgactaattttcatgatctcagattgtgaggtaaatgtaatctggaataataagtgtcttttacctagattacatctctcatttggagtttggcaatgaaactgctatgaagaatgactgtactctcctatctgtccctggatgacataaatatcatttgctttgttgtttaaactgaaataaagttttccaagaacaaaaaaaaaaaaaa

SEQ ID NO: 316 - protein, 314 aa, Homo Sapiens
MSSTAAFYLLSTLGGYLVTSFLLLKYPTLLHQRKKQRFLSKHISHRGGAGENLENTMAAFQHAVKIGTDMLELDCHITKDEQVVVSHDENLKRATGVNVNISDLKYCELPPYLGKLDVSFQRACQCEGKDNRIPLLKEVFEAFPNTPINIDIKVNNNVLIKKVSELVKRYNREHLTVWGNANYEIVEKCYKENSDIPILFSLQRVLLILGLFFTGLLPFVPIREQFFEIPMPSIILKLKEPHTMSRSQKFLIWLSDLLLMRKALFDHLTARGIQVYIWVLNEEQEYKRAFDLGATGVMTDYPTKLRDFLHNFSA

SEQ ID NO: 317 - DNA, 1494 bp, Homo Sapiens
agtgaaacagaaggggaggtgcagtttcagaacccagccagcctctctcttgctgcctagcctcctgccggcctcatcttcgcccagccaaccccgcctggagccctatggccaactgcgagttcagcccggtgtccggggacaaaccctgctgccggctctctaggagagcccaactctgtcttggcgtcagtatcctggtcctgatcctcgtcgtggtgctcgcggtggtcgtcccgaggtggcgccagcagtggagcggtccgggcaccaccaagcgctttcccgagaccgtcctggcgcgatgcgtcaagtacactgaaattcatcctgagatgagacatgtagactgccaaagtgtatgggatgctttcaagggtgcatttatttcaaaacatccttgcaacattactgaagaagactatcagccactaatgaagttgggaactcagaccgtaccttgcaacaagattcttctttggagcagaataaaagatctggcccatcagttcacacaggtccagcgggacatgttcaccctggaggacacgctgctaggctaccttgctgatgacctcacatggtgtggtgaattcaacacttccaaaataaactatcaatcttgcccagactggagaaaggactgcagcaacaaccctgtttcagtattctggaaaacggtttcccgcaggtttgcagaagctgcctgtgatgtggtccatgtgatgctcaatggatcccgcagtaaaatctttgacaaaaacagcacttttgggagtgtggaagtccataatttgcaaccagagaaggttcagacactagaggcctgggtgatacatggtggaagagaagattccagagacttatgccaggatcccaccataaaagagctggaatcgattataagcaaaaggaatattcaattttcctgcaagaatatctacagacctgacaagtttcttcagtgtgtgaaaaatcctgaggattcatcttgcacatctgagatctgagccagtcgctgtggttgttttagctccttgactccttgtggtttatgtcatcatacatgactcagcatacctgctggtgcagagctgaagattttggagggtcctccacaataaggtcaatgccagagacggaagcctttttccccaaagtcttaaaataacttatatcatcagcatacctttattgtgatctatcaatagtcaagaaaaattattgtataagattagaatgaaaattgtatgttaagttacttcactttaattctcatgtgatccttttatgttatttatatattggtaacatcctttctattgaaaaatcaccacaccaaacctctcttattagaacaggcaagtgaagaaaagtgaatgctcaagtttttcagaaagcattacatttccaaatgaatgaccttgttgcatgatgtatttttgtacccttcctacagatagtcaaaccataaacttcatggtcatgggtaaa

SEQ ID NO: 318 - protein, 300 aa, Homo Sapiens
MANCEFSPVSGDKPCCRLSRRAQLCLGVSILVLILVVVLAVVVPRWRQQWSGPGTTKRFPETVLARCVKYTEIHPEMRHVDCQSVWDAFKGAFISKHPCNITEEDYQPLMKLGTQTVPCNKILLWSRIKDLAHQFTQVQRDMFTLEDTLLGYLADDLTWCGEFNTSKINYQSCPDWRKDCSNNPVSVFWKTVSRRFAEAACDVVHVMLNGSRSKIFDKNSTFGSVEVHNLQPEKVQTLEAWVIHGGREDSRDLCQDPTIKELESIISKRNIQFSCKNIYRPDKFLQCVKNPEDSSCTSEI

SEQ ID NO: 319 - DNA, 5966 bp, Homo Sapiens
gtgatgttatctgctggcagcagaaggttcgctccgagcggagctccagaagctcctgacaagagaaagacagattgagatagagatagaaagagaaagagagaaagagacagcagagcgagagcgcaagtgaaagaggcaggggagggggatggagaatattagcctgacggtctagggagtcatccaggaacaaactgaggggctgcccggctgcagacaggaggagacagagaggatctattttagggtggcaagtgcctacctaccctaagcgagcaattccacgttggggagaagccagcagaggttgggaaagggtgggagtccaagggagcccctgcgcaaccccctcaggaataaaactccccagccagggtgtcgcaagggctgccgttgtgatccgcagggggtgaacgcaaccgcgacggctgatcgtctgtggctgggttggcgtttggagcaagagaaggaggagcaggagaaggagggagctggaggctggaagcgtttgcaagcggcggcggcagcaacgtggagtaaccaagcgggtcagcgcgcgcccgccagggtgtaggccacggagcgcagctcccagagcaggatccgcgccgcctcagcagcctctgcggcccctgcggcacccgaccgagtaccgagcgccctgcgaagcgcaccctcctccccgcggtgcgctgggctcgcccccagcgcgcgcacacgcacacacacacacacacacacacacgcacgcacacacgtgtgcgcttctctgctccggagctgctgctgctcctgctctcagcgccgcagtggaaggcaggaccgaaccgctccttctttaaatatataaatttcagcccaggtcagcctcggcggcccccctcaccgcgctcccggcgcccctcccgtcagttcgccagctgccagccccgggaccttttcatctcttcccttttggccggaggagccgagttcagatccgccactccgcacccgagactgacacactgaactccacttcctcctcttaaatttatttctacttaatagccactcgtctctttttttccccatctcattgctccaagaatttttttcttcttactcgccaaagtcagggttccctctgcccgtcccgtattaatatttccacttttggaactactggccttttctttttaaaggaattcaagcaggatacgtttttctgttgggcattgactagattgtttgcaaaagtttcgcatcaaaaacaacaacaacaaaaaaccaaacaactctccttgatctatactttgagaattgttgatttcttttttttattctgacttttaaaaacaacttttttttccacttttttaaaaaatgcactactgtgtgctgagcgcttttctgatcctgcatctggtcacggtcgcgctcagcctgtctacctgcagcacactcgatatggaccagttcatgcgcaagaggatcgaggcgatccgcgggcagatcctgagcaagctgaagctcaccagtcccccagaagactatcctgagcccgaggaagtccccccggaggtgatttccatctacaacagcaccagggacttgctccaggagaaggcgagccggagggcggccgcctgcgagcgcgagaggagcgacgaagagtactacgccaaggaggtttacaaaatagacatgccgcccttcttcccctccgaaactgtctgcccagttgttacaacaccctctggctcagtgggcagcttgtgctccagacagtcccaggtgctctgtgggtaccttgatgccatcccgcccactttctacagaccctacttcagaattgttcgatttgacgtctcagcaatggagaagaatgcttccaatttggtgaaagcagagttcagagtctttcgtttgcagaacccaaaagccagagtgcctgaacaacggattgagctatatcagattctcaagtccaaagatttaacatctccaacccagcgctacatcgacagcaaagttgtgaaaacaagagcagaaggcgaatggctctccttcgatgtaactgatgctgttcatgaatggcttcaccataaagacaggaacctgggatttaaaataagcttacactgtccctgctgcacttttgtaccatctaataattacatcatcccaaataaaagtgaagaactagaagcaagatttgcaggtattgatggcacctccacatataccagtggtgatcagaaaactataaagtccactaggaaaaaaaacagtgggaagaccccacatctcctgctaatgttattgccctcctacagacttgagtcacaacagaccaaccggcggaagaagcgtgctttggatgcggcctattgctttagaaatgtgcaggataattgctgcctacgtccactttacattgatttcaagagggatctagggtggaaatggatacacgaacccaaagggtacaatgccaacttctgtgctggagcatgcccgtatttatggagttcagacactcagcacagcagggtcctgagcttatataataccataaatccagaagcatctgcttctccttgctgcgtgtcccaagatttagaacctctaaccattctctactacattggcaaaacacccaagattgaacagctttctaatatgattgtaaagtcttgcaaatgcagctaaaattcttggaaaagtggcaagaccaaaatgacaatgatgatgataatgatgatgacgacgacaacgatgatgcttgtaacaagaaaacataagagagccttggttcatcagtgttaaaaaatttttgaaaaggcggtactagttcagacactttggaagtttgtgttctgtttgttaaaactggcatctgacacaaaaaaagttgaaggccttattctacatttcacctactttgtaagtgagagagacaagaagcaaattttttttaaagaaaaaaataaacactggaagaatttattagtgttaattatgtgaacaacgacaacaacaacaacaacaacaaacaggaaaatcccattaagtggagttgctgtacgtaccgttcctatcccgcgcctcacttgatttttctgtattgctatgcaataggcacccttcccattcttactcttagagttaacagtgagttatttattgtgtgttactatataatgaacgtttcattgcccttggaaaataaaacaggtgtataaagtggagaccaaatactttgccagaaactcatggatggcttaaggaacttgaactcaaacgagccagaaaaaaagaggtcatattaatgggatgaaaacccaagtgagttattatatgaccgagaaagtctgcattaagataaagaccctgaaaacacatgttatgtatcagctgcctaaggaagcttcttgtaaggtccaaaaactaaaaagactgttaataaaagaaactttcagtcagaataagtctgtaagtttttttttttctttttaattgtaaatggttctttgtcagtttagtaaaccagtgaaatgttgaaatgttttgacatgtactggtcaaacttcagaccttaaaatattgctgtatagctatgctataggttttttcctttgttttggtatatgtaaccatacctatattattaaaatagatggatatagaagccagcataattgaaaacacatctgcagatctcttttgcaaactattaaatcaaaacattaactactttatgtgtaatgtgtaaatttttaccatattttttatattctgtaataatgtcaactatgatttagattgacttaaatttgggctctttttaatgatcactcacaaatgtatgtttcttttagctggccagtacttttgagtaaagcccctatagtttgacttgcactacaaatgcattttttttttaataacatttgccctacttgtgctttgtgtttctttcattattatgacataagctacctgggtccacttgtcttttcttttttttgtttcacagaaaagatgggttcgagttcagtggtcttcatcttccaagcatcattactaaccaagtcagacgttaacaaatttttatgttaggaaaaggaggaatgttatagatacatagaaaattgaagtaaaatgttttcattttagcaaggatttagggttctaactaaaactcagaatctttattgagttaagaaaagtttctctaccttggtttaatcaatatttttgtaaaatcctattgttattacaaagaggacacttcataggaaacatctttttctttagtcaggtttttaatattcagggggaaattgaaagatatatattttagtcgatttttcaaaaggggaaaaaagtccaggtcagcataagtcattttgtgtatttcactgaagttataaggtttttataaatgttctttgaaggggaaaaggcacaagccaatttttcctatgatcaaaaaattctttctttcctctgagtgagagttatctatatctgaggctaaagtttaccttgctttaataaataatttgccacatcattgcagaagaggtatcctcatgctggggttaatagaatatgtcagtttatcacttgtcgcttatttagctttaaaataaaaattaataggcaaagcaatggaatatttgcagtttcacctaaagagcagcataaggaggcgggaatccaaagtgaagttgtttgatatggtctacttcttttttggaatttcctgaccattaattaaagaattggatttgcaagtttgaaaactggaaaagcaagagatgggatgccataatagtaaacagcccttgtgttggatgtaacccaatcccagatttgagtgtgtgttgattatttttttgtcttccacttttctattatgtgtaaatcacttttatttctgcagacattttcctctcagataggatgacattttgttttgtattattttgtctttcctcatgaatgcactgataatattttaaatgctctattttaagatctcttgaatctgttttttttttttttaatttgggggttctgtaaggtctttatttcccataagtaaatattgccatgggaggggggtggaggtggcaaggaaggggtgaagtgctagtatgcaagtgggcagcaattatttttgtgttaatcagcagtacaatttgatcgttggcatggttaaaaaatggaatataagattagctgttttgtattttgatgaccaattacgctgtattttaacacgatgtatgtctgtttttgtggtgctctagtggtaaataaattatttcgatgatatgtggatgtctttttcctatcagtaccatcatcgagtctagaaaacacctgtgatgcaataagactatctcaagctggaaaagtcataccacctttccgattgccctctgtgctttctcccttaaggacagtcacttcagaagtcatgctttaaagcacaagagtcaggccatatccatcaaggatagaagaaatccctgtgccgtctttttattcccttatttattgctatttggtaattgtttgagatttagtttccatccagcttgactgccgaccagaaaaaatgcagagagatgtttgcaccatgctttggctttctggttctatgttctgccaacgccagggccaaaagaactggtctagacagtatcccctgtagccccataacttggatagttgctgagccagccagatataacaagagccacgtgctttctggggttggttgtttgggatcagctacttgcctgtcagtttcactggtaccactgcaccacaaacaaaaaaacccaccctatttcctccaatttttttggctgctacctacaagaccagactcctcaaacgagttgccaatctcttaataaataggattaataaaaaaagtaattgtgactcaaaaaaaaaaaaaa

SEQ ID NO: 320 - protein, 442 aa, Homo Sapiens
MHYCVLSAFLILHLVTVALSLSTCSTLDMDQFMRKRIEAIRGQILSKLKLTSPPEDYPEPEEVPPEVISIYNSTRDLLQEKASRRAAACERERSDEEYYAKEVYKIDMPPFFPSETVCPVVTTPSGSVGSLCSRQSQVLCGYLDAIPPTFYRPYFRIVRFDVSAMEKNASNLVKAEFRVFRLQNPKARVPEQRIELYQILKSKDLTSPTQRYIDSKVVKTRAEGEWLSFDVTDAVHEWLHHKDRNLGFKISLHCPCCTFVPSNNYIIPNKSEELEARFAGIDGTSTYTSGDQKTIKSTRKKNSGKTPHLLLMLLPSYRLESQQTNRRKKRALDAAYCFRNVQDNCCLRPLYIDFKRDLGWKWIHEPKGYNANFCAGACPYLWSSDTQHSRVLSLYNTINPEASASPCCVSQDLEPLTILYYIGKTPKIEQLSNMIVKSCKCS

SEQ ID NO: 321 - DNA, 4074 bp, Homo Sapiens
gacaggcctctcggcgagccggtgccccatcgggtaccgcacggctgccgcggcggccttaccctgccgcgagcgcctgtgacagcggcgccgctgtgctcgcgaccccggctccgggcctctgccgacctcaggggcaggaaagagtcgcccggcgggatgggcggggaggctgggtgcgcggcggccgtgggtgccgagggccgcgtgaagagcctgggtctggtgttcgaggacgagcgcaagggctgctattccagcggcgagacagtggccgggcacgtgctgctggaggcgtccgagccggtggccctgcgcgcgctgcgcctggaggcccaggggcgcgccaccgccgcctggggcccgagcacctgcccccgcgcctcggccagcaccgcggccctggctgtcttctcggaggtggagtacctgaacgtgcgcctcagcctgcgggagcccccggccggtgaaggcatcattttattacagcctggaaaacatgaatttccatttcgctttcaacttccatctgaacctttggtcacctcgtttactgggaaatatggaagcattcagtactgtgtgcgggcagtgttggaacgacccaaggtacctgatcagagtgtaaagcgggaactccaggttgttagtcatgtcgatgtcaacacaccagcattattaacccctgtattgaaaactcaagagaaaatggttggctgttggtttttcacttctggtccagtctcgctgagtgccaaaattgaaagaaagggatactgtaatggagaagctattccaatctatgcagaaatagaaaattgttcctctcgtctgattgttccaaaggctgctattttccaaacgcagacatatttggctagtggaaaaacaaagaccattcgacacatggtcgccaatgtgcgaggaaaccacatcgcttctgggagcacagacacatggaatgggaaaacgctaaaaatcccacctgttactccatccatcctggattgctgcattatcagagtggactattccttagctgtatacattcacattcctggtgctaaaaaattgatgctcgaactgccattagtgatcggtacaattccatataatggttttggcagcagaaactccagcattgccagccagttcagtatggatatgagctggttgacactgaccctgccagagcagcctgaagcaccaccaaattatgcagatgtggtatcagaggaagaattctctagacacattcctccttaccctcaaccccctaactgtgagggagaagtgtgctgtcctgtgtttgcctgtatacaagaattccggtttcaacccccacctctttattcagaggttgacccacatcctagcgacgtagaagagagccagcctgtttccttcattctctgaacgtatttcagaaatcactgtgttcatcatcaaattagaatgttggttcttttccttctgcctttttgggaaagagacaggaaagattcacttgaaaacataaatgaacgtcaagactgaaggcaatagaaattaaagaatgtgagaaagttctggtgggccggcaggattgccgcacaagtttatatgatggtcgtatatatatccctgttaaaaactgggatgaagatgtgcaaagtcacagaatgtaatggaagtcctgatggttacagagtaagtgaaagggtgcctgcgctgacgtgagagaaaggaatctgtaaacagtggaaacactgtgggagtttcccatggtgaagagtggaacgaaggcgatatgaactgaaggggtgaagacttgattttggagagggcaacaaaacaagggtgtgtgtgcataggagaatggcccactccaaatacgaagtgagatcctgagtctttgggtgcttcatgatttcctaccatattcaggcctaaagacattgaaaaagcatcttttcttgagatcatggtcatatgaggtcctaatgaagtactacagttttcattctttcaagggtagactaaaatatagtttataaatcggcagtacggtattatgaaaccaagaaagggtttcttgaaaagcttgtcggttcaaagaggaaagatgaatttcaatgtgaaaacacgttttgttgagggctgtactttttaccccctttaagtgctttaacaggatatacgtttgattttcctcatatcttatttacctaggagcatgtaagagaaagaagggagagaaaaggttgcatctgcaggatgccttgataactacacagtcccaaataaaaggcctttttctaacctacctctaatggggttatcagatatgtttttaaatctctcgccctgagtactcttcttgggagttgctgctgtttacagccacagtctcatctatcactaaatatgaaactgggccaaggggaaaattcagtaagttagcgttaaatggaagtaaatatatgtatacctaagagaatgtcaaaataaacaccaaaccaaaagaaggtaggagtgccatttttagaaaagacacaactttaattcctgtcaagagacctaggtctactgatggcagtcactgcattgtacattattccagttcttcagtaattctgtttaaactgtgattttctttattgtgttggtgcaatattttattatcatttaacctcaggatattcagaccaacaggattgtgttgctgctgaaagtctgagcagtgttttaccgtccccagcccccctcccacatggtcacatgttcacttgcttttccttccatctgttggttttgtgagctgagagcatctctggacacatggaagggagccagggattcctgtgatacagattttgaaccagcagagtactttggttttcttcatgtcctaagggtttgatccagaaaccctggtgcttcccctgcagaatactgtacttcatttaacagaatgattgatttttctttcaatcagcatgttcaccaaaaatagaaaagttcttctaaggttaaattttgtatttaaaagttagttggccatttgatcagggaattttctacacacattaggcaaatgtatgcttttcatcctctgggcttacctctctcctctgcaatcctggaagcatcgtgcatagttctttcattgtaagccgctatttaaattcccacaatgcaaaactgttagaccagtaattgtgctactgaaattgtcacaaaacgttattccttgatttggtttttaaattttgctttcgtgtgtgtgtctttaaacaggtaatgtgtatttaagtgttgtctaaacagttgatttttactttagaaaagatcatcttcaactgtttattgacttctgagttatatagttcatgccctgccaaggcattgttcgactccatgatactaaaacataatgaaagaaacaaactccagtatggagaagagaaagtttaattatttggttccatctagaaaagcaacaacttaaaggaatccttcactaggattgtcttatcacctttattagataaatcatgaagtgtccctgtgaaattgaagtgaaactatctctgtaggacttaagagaatagctaaaaggtgtgacttgccttattgaaatgatactggcatatctgactgtaagcagtaggttgaagatatcattttatgaatgtggagaattctacattgaaacagaaaatacctgggaatgaagattaaaaatgtagctgctgttatttgcttggttattcccctcttgctcttctttagtttgaaaaaacaaaaacgtggccttggaattttcattttgatgcagaaattttgaaattgaaaatgtgcatgttttggtgcacaaaatccttctgtgggcaaaactttgtttttgttttgcacagtaagaaacaataggcaagcgttatgtttttggtaagttaactatgaaagctttcttatttttattattaaaaatgtaacaatttaacccacaggaaaaaaaattactttgtatgcttgtttgaaccctatgggttcgttttattaataaaattattacactaatgctaaaaaaaa

SEQ ID NO: 322 - protein, 418 aa, Homo Sapiens
MGGEAGCAAAVGAEGRVKSLGLVFEDERKGCYSSGETVAGHVLLEASEPVALRALRLEAQGRATAAWGPSTCPRASASTAALAVFSEVEYLNVRLSLREPPAGEGIILLQPGKHEFPFRFQLPSEPLVTSFTGKYGSIQYCVRAVLERPKVPDQSVKRELQVVSHVDVNTPALLTPVLKTQEKMVGCWFFTSGPVSLSAKIERKGYCNGEAIPIYAEIENCSSRLIVPKAAIFQTQTYLASGKTKTIRHMVANVRGNHIASGSTDTWNGKTLKIPPVTPSILDCCIIRVDYSLAVYIHIPGAKKLMLELPLVIGTIPYNGFGSRNSSIASQFSMDMSWLTLTLPEQPEAPPNYADVVSEEEFSRHIPPYPQPPNCEGEVCCPVFACIQEFRFQPPPLYSEVDPHPSDVEESQPVSFIL

SEQ ID NO: 323 - DNA, 1851 bp, Homo Sapiens
gtgcaggtgaggcacgtttagcctgagccggccacggactccacttcccctgctcttcccccagtggcaaatccgcgccacctcgcaaacccccaactcaggcacttgggccccttttgggccccctctcgctcctccctttaggcacctccctgggcccgcccacggtctccccccagtttgggactgcgtcataagtatcccagacctcggcttgcagtagtgttagactgaagataaagtaagtgctgtttgggctaacaggatctcctcttgcagtctgcagcccaggacgctgattccagcagcgccttaccgcgcagcccgaagattcactatggtgaaaatcgccttcaatacccctaccgccgtgcaaaaggaggaggcgcggcaagacgtggaggccctcctgagccgcacggtcagaactcagatactgaccggcaaggagctccgagttgccacccaggaaaaagagggctcctctgggagatgtatgcttactctcttaggcctttcattcatcttggcaggacttattgttggtggagcctgcatttacaagtacttcatgcccaagagcaccatttaccgtggagagatgtgcttttttgattctgaggatcctgcaaattcccttcgtggaggagagcctaacttcctgcctgtgactgaggaggctgacattcgtgaggatgacaacattgcaatcattgatgtgcctgtccccagtttctctgatagtgaccctgcagcaattattcatgactttgaaaagggaatgactgcttacctggacttgttgctggggaactgctatctgatgcccctcaatacttctattgttatgcctccaaaaaatctggtagagctctttggcaaactggcgagtggcagatatctgcctcaaacttatgtggttcgagaagacctagttgctgtggaggaaattcgtgatgttagtaaccttggcatctttatttaccaactttgcaataacagaaagtccttccgccttcgtcgcagagacctcttgctgggtttcaacaaacgtgccattgataaatgctggaagattagacacttccccaacgaatttattgttgagaccaagatctgtcaagagtaagaggcaacagatagagtgtccttggtaataagaagtcagagatttacaatatgactttaacattaaggtttatgggatactcaagatatttactcatgcatttactctattgcttatgctttaaaaaaaggaaaaaaaaaaactactaaccactgcaagctcttgtcaaattttagtttaattggcattgcttgttttttgaaactgaaattacatgagtttcattttttctttgaatttatagggtttagatttctgaaagcagcatgaatatatcacctaacatcctgacaataaattccatccgttgttttttttgtttgtttgttttttcttttcctttaagtaagctctttattcatcttatggtggagcaattttaaaatttgaaatattttaaattgtttttgaactttttgtgtaaaatatatcagatctcaacattgttggtttcttttgtttttcattttgtacaactttcttgaatttagaaattacatctttgcagttctgttaggtgctctgtaattaacctgacttatatgtgaacaattttcatgagacagtcatttttaactaatgcagtgattctttctcactactatctgtattgtggaatgcacaaaattgtgtaggtgctgaatgctgtaaggagtttaggttgtatgaattctacaaccctataataaattttactctatacaaaaaaaaaaaaaaaaaaa

SEQ ID NO: 324 - protein, 263 aa, Homo Sapiens
MVKIAFNTPTAVQKEEARQDVEALLSRTVRTQILTGKELRVATQEKEGSSGRCMLTLLGLSFILAGLIVGGACIYKYFMPKSTIYRGEMCFFDSEDPANSLRGGEPNFLPVTEEADIREDDNIAIIDVPVPSFSDSDPAAIIHDFEKGMTAYLDLLLGNCYLMPLNTSIVMPPKNLVELFGKLASGRYLPQTYVVREDLVAVEEIRDVSNLGIFIYQLCNNRKSFRLRRRDLLLGFNKRAIDKCWKIRHFPNEFIVETKICQE

SEQ ID NO: 325 - DNA, 2418 bp, Homo Sapiens
agccccagccccagccccggccccggccccggctcgcgggcgctgcgtctccgcgtacaggaggcggcggcggctcccagtcaccggcccccgccggcgagcgcacgatgcactgcctgggcgccgagtacctggtttctgcagaaggagcccctaggcaaagggagtggcgaccccagatttataggaaatgcacagatacggcatggttattcctgttctttctcttttggactggtttggtgtttatcatgggctactcggtggtggctggagccgcgggaagactcctctttggctatgacagctttggcaacatgtgtggcaagaagaactcccccgtggaaggggcccctctttcagggcaggacatgaccctaaaaaaacacgtgttctttatgaattcctgcaacctggaagtcaaaggtacgcagctcaaccgcatggccctctgtgtatccaactgccctgaagagcagcttgactccctggaagaggtccagttctttgcaaacaccagtgggtccttcctgtgtgtttatagtttgaattccttcaactatacccacagtccaaaagcagactcactgtgtcccaggctaccagttcctccaagcaagtcatttcccttatttaaccgatgtgtccctcaaacacctgagtgctactccctatttgcatctgttttgataaatgatgttgacaccctccaccgaattctaagtggaatcatgtcgggaagagatacaatccttggcctgtgtatcctcgcattagccttgtctttggccatgatgtttaccttcagattcatcaccacccttctggttcacattttcatttcattggttattttgggattgttgtttgtctgcggtgttttatggtggctgtattatgactataccaacgacctcagcatagaattggacacagaaagggaaaatatgaagtgcgtgctggggtttgctatcgtatccacaggcatcacggcagtgctgctcgtcttgatttttgttctcagaaagagaataaaattgacagttgagcttttccaaatcacaaataaagccatcagcagtgctcccttcctgctgttccagccactgtggacatttgccatcctcattttcttctgggtcctctgggtggctgtgctgctgagcctgggaactgcaggagctgcccaggttatggaaggcggccaagtggaatataagcccctttcgggcattcggtacatgtggtcgtaccatttaattggcctcatctggactagtgaattcatccttgcgtgccagcaaatgactatagctggggcagtggttacttgttatttcaacagaagtaaaaatgatcctcctgatcatcccatcctttcgtctctctccattctcttcttctaccatcaaggaaccgttgtgaaagggtcatttttaatctctgtggtgaggattccgagaatcattgtcatgtacatgcaaaacgcactgaaagaacagcagcatggtgcattgtccaggtacctgttccgatgctgctactgctgtttctggtgtcttgacaaatacctgctccatctcaaccagaatgcatatactacaactgctattaatgggacagatttctgtacatcagcaaaagatgcattcaaaatcttgtccaagaactcaagtcactttacatctattaactgctttggagacttcataatttttctaggaaaggtgttagtggtgtgtttcactgtttttggaggactcatggcttttaactacaatcgggcattccaggtgtgggcagtccctctgttattggtagctttttttgcctacttagtagcccatagttttttatctgtgtttgaaactgtgctggatgcacttttcctgtgttttgctgttgatctggaaacaaatgatggatcgtcagaaaagccctactttatggatcaagaatttctgagtttcgtaaaaaggagcaacaaattaaacaatgcaagggcacagcaggacaagcactcattaaggaatgaggagggaacagaactccaggccattgtgagatagatacccatttaggtatctgtacctggaaaacatttccttctaagagccatttacagaatagaagatgagaccactagagaaaagttagtgaatttttttttaaaagacctaataaaccctattcttcctcattgtctttgtcattattgtttgaccaggtaacaatactggaactatattagtttacctttttttgtacaaattaggacagaaaaactcttctaaaaccatgtttatatgcatcaacttacaaagtacactatgtaagaactgaggtaagtttgtaagtgcacaactaataaataaacctttttaagataaggaaaaaaaaaaaaaaaaaaaaaaaaaa

SEQ ID NO: 326 - protein, 653 aa, Homo Sapiens
MHCLGAEYLVSAEGAPRQREWRPQIYRKCTDTAWLFLFFLFWTGLVFIMGYSVVAGAAGRLLFGYDSFGNMCGKKNSPVEGAPLSGQDMTLKKHVFFMNSCNLEVKGTQLNRMALCVSNCPEEQLDSLEEVQFFANTSGSFLCVYSLNSFNYTHSPKADSLCPRLPVPPSKSFPLFNRCVPQTPECYSLFASVLINDVDTLHRILSGIMSGRDTILGLCILALALSLAMMFTFRFITTLLVHIFISLVILGLLFVCGVLWWLYYDYTNDLSIELDTERENMKCVLGFAIVSTGITAVLLVLIFVLRKRIKLTVELFQITNKAISSAPFLLFQPLWTFAILIFFWVLWVAVLLSLGTAGAAQVMEGGQVEYKPLSGIRYMWSYHLIGLIWTSEFILACQQMTIAGAVVTCYFNRSKNDPPDHPILSSLSILFFYHQGTVVKGSFLISVVRIPRIIVMYMQNALKEQQHGALSRYLFRCCYCCFWCLDKYLLHLNQNAYTTTAINGTDFCTSAKDAFKILSKNSSHFTSINCFGDFIIFLGKVLVVCFTVFGGLMAFNYNRAFQVWAVPLLLVAFFAYLVAHSFLSVFETVLDALFLCFAVDLETNDGSSEKPYFMDQEFLSFVKRSNKLNNARAQQDKHSLRNEEGTELQAIVR

SEQ ID NO: 327 - DNA, 9288 bp, Homo Sapiens
agtgctcgcccgcccgaccccggcggctcgcgcccgggagcgccgcagggtcgctagagtcggccgcgtcctttgtgtggcgctcaggctgcgccgcggggcggcgggacggaatgtgggcgctgcgggggcttttctctcctacccgaactgtgggaacaatggactgaaaggggaagatggattgaggggccgagcggggaagcgagctgcaccggggaatcatgacttctgcagccgagataaagaagccaccagtggcccccaagcccaagtttgttgtggcaaataataagccagccccacctcctattgcacctaaacccgacattgtgatttctagtgttccacagtcgacaaagaaaatgaaaccagcaatagccccaaaaccaaaagtcctgaagacctcacctgttcgagagattgggcagtcgccatcaaggaaaatcatgttgaacctggaagggcataaacaggaattagctgaaagcactgacaactttaattgtaaatatgaaggcaatcagagcaatgattatatttcaccaatgtgttcctgcagttctgagtgtatccataagctgggccatagagagaatttgtgtgtaaagcagcttgttttagagcccctggaaatgaatgaaaatttagaaaacagtaaaattgatgagactttgactataaaaactaggagtaaatgtgatttgtatggtgaaaaagccaagaaccagggtggggttgttttaaaggcaagcgttttagaagaggagctcaaagatgccttaatacaccaaatgccaccttttatttctgcacagaagcacaggcccacagacagcccagaaatgaatggtggctgtaattcaaatggacaattcagaattgaatttgcggatttgtcaccttccccatccagctttgaaaaagttcctgatcatcacagttgccacttacagcttcctagtgatgaatgtgaacattttgaaacttgccaggatgacagtgaaaaaagcaataattgctttcagtcatctgaactagaggctctggaaaatgggaaaaggagtactttaatatcttcagatggagttagtaagaaatcagaagtcaaagaccttggtcccttagaaattcatttagtaccatataccccaaaatttccaactcccaagcccagaaagacacgaactgctcgtctgttacgccaaaagtgtgtagatactcctagtgaaagcactgaagaaccggggaattcagacagtagctcttcctgtcttactgaaaatagtttgaaaatcaataaaatcagtgttctgcatcagaatgttttgtgtaagcaggaacaggtggataaaatgaagctaggaaataaaagtgaattgaatatggaatccaacagtgatgcacaggacttagtcaattcacagaaagccatgtgtaatgaaacaacttcctttgaaaaaatggcaccttcttttgataaagactctaatttgagttctgacagcacaactgtagatggttctagtatgtcgcttgctgtggacgaagggaccggttttataagatgtactgtatctatgagcctgcctaagcagctcaaattaacttgcaatgaacatttgcaatctgggagaaacctgggagtttctgcccctcaaatgcaaaaggaatctgttataaaagaggaaaattctctacgaattgtccccaaaaaacctcaaagacatagcttgcctgctacaggagtgcttaaaaaggctgcctccgaggagcttttggaaaaaagttcttatccttcaagtgaagaaaaaagttcagagaagagtctagaaagaaatcaccttcagcatttgtgtgcccaaaaccgtggtgtgtcatcctcctttgatatgcctaaacgggcttcagaaaagccagtgtggaagttacctcatcctattttacccttttcagggaacccagaattcttaaagtctgtcaccgtatcgtcaaacagtgagccttcaacagccctaaccaagcccagagcaaaatcgttatctgctatggatgtggaaaagtgcactaagccttgcaaagactctacaaagaaaaactcttttaaaaagttgctcagcatgaaactgtccatctgtttcatgaagagtgactttcaaaaattttggtccaagagtagccaactcggagacaccaccacaggccacctctccagtggggagcagaaggggattgaaagtgattggcaaggcttgttggtaggagaggagaagagaagtaaacccatcaaggcatattccacagaaaactatagcctggaatctcaaaagaagaggaagaagtctcggggccagaccagtgcagctaatggtctgagagctgagtctttggatgaccaaatgctctcccgggagtcatcatctcaggcaccttacaagtctgttacaagcctctgtgcaccggagtatgaaaatatacgccattatgaggaaataccagagtacgagaacttgccatttattatggctatacggaaaactcaagagttggaatggcagaattccagcagcatggaggacgctgatgcaaatgtgtatgaggtagaagagccgtatgaagctccagatggccagctgcagcttggacccagacatcagcattccagttcaggagcatcccaggaggaacagaatgatcttggtcttggtgaccttccctctgatgaggaggaaatcatcaacagttctgatgaagatgatgtcagctctgagtcaagtaaaggagagcctgacccactggaagataaacaggatgaagataatggaatgaaaagtaaagttcatcatattgccaaggagatcatgagctcagagaaagtgtttgtggatgtgttaaaacttttgcatattgatttccgggatgcagtagctcatgcttccaggcaacttgggaaaccagtgattgaggaccggattctaaatcagatcctatactacttgcctcagctgtatgagctcaaccgggatctcttgaaggaactggaggaaagaatgttgcactggactgaacaacaaagaattgctgatatctttgtaaagaagggaccatatctaaaaatgtattccacatacatcaaagaatttgataagaatatagccttgctggatgaacagtgcaagaaaaatccaggttttgctgctgttgttagagaatttgagatgagccctcgctgtgctaatctggccctcaagcactacctgctcaagccggttcagaggatcccccagtacaggctgttgctgacagattatttgaagaatctcatagaagatgctggagattacagagacactcaagatgcccttgctgttgttatagaggtagccaaccacgccaatgacaccatgaagcaaggagacaactttcagaaacttatgcaaattcagtacagcttaaatggacaccatgaaattgtgcagcctggtcgggtttttctcaaagaaggaattctgatgaagctgtctcggaaagtgatgcaacctcgaatgtttttcctgtttaatgatgccctgctgtatacaacaccagtgcagtctgggatgtataaactgaacaacatgctctcactggctggaatgaaggtcagaaaacctacccaagaagcctatcagaatgaattaaagattgaaagtgtagaacgttccttcattctctcagccagttctgccacagaaagggatgaatggctagaagcgatttccagggcaatagaagagtatgccaagaaaagaatcaccttctgtcctagtaggagtcttgatgaggcagactcagaaaataaagaagaagttagtcctcttggatcgaaggctcccatctggattcctgataccagagccacaatgtgtatgatctgcacaagcgaattcactctcacctggagacgacaccactgccgggcctgtggaaagattgtatgccaagcttgttcgtctaataagtatggcttagattacctgaaaaatcaaccagcaagagtatgtgaacattgtttccaagaactgcagaaattagatcaccagcactcccctaggattggatctcctggaaatcacaaatctccttcaagtgccttatcatcagtcttacatagcattccatcagggaggaaacagaaaaaaatcccagctgctctcaaagaagtatcagcaaacacagaggattcttctatgagtggctacttgtacagatcaaagggcaataaaaaaccctggaaacacttttggtttgtcataaaaaataaagtactatatacatatgctgcaagtgaggacgtggccgctttggagagtcagcctttattaggattcactgttattcaagttaaagatgagaattccgagtctaaagtatttcagttactgcacaaaaacatgttattttatgtattcaaagcagaggatgctcattcggctcagaagtggatagaagcatttcaggaaggcacaatattgtagcagtattggtttcatctcttctgtgattccaaagaggtggaatttcatcagaatggagtaaatgcaattcaaaaattgtataaaaatgaacactgccaagataaagccaaccagacccttcatcaaagaaattgttttgttaggtataagcaatttttaaaaggtgtttgttttttcatttatgttatttattaaaattttgatgtttacttaatggtcagaattatttctgagacacactgaattctaaagtaccatttctttagagaccagaaaaactatcttaatactgtatactgtattaactattcgtgacatagttcacactgttttcttaccttacattgtaacaatcttactggtggaaagtctttgtaaggaaaaaacacatagcaaggagcaaatttccacaaagtgcttggtttaggaattgtgattattataaaactgctgatgaaaaaaatgcatgtctttgaatcaataaacttgggtgaatatttgtatcttttagtggaaaaacatggccagcttctacctcagtaactgtgaactgaaatttcagtaaattatctaaagtatttctgttgttaggtacctctttggcaggagttaatattacatcatcaaagaattatagcaaagagatagaatctgaattttttaaaactgtgagtaggaatgaagatgtttttatttgcagaataccacaaataaccaactcttccggcttttaagtccaatcttttaaaaaatctaccacttcgaaacaaacataaatgtatcattttttaaaatagcaaaatatagcaagcattatgtcacataatattccctgctattataagagttctgagcccaagtcaatgatgatatttgtatctataagtaatgttacatttccaaaaatattgtgcattacaaatggaactggaattactatatcagaaaagcataattataagccagtaataactgaaattctatagtattcattttcaaaaggtctttttctgccagtttgtgatatcctccctcctaattaaaaaaaaaaacaacaaatcctttctctataagcagctatcagcacacctccttaggaaagatttagattcataattctggtgcacttactgtttaacatatgaactaccttgcacatacaattgttgattagcagaagaaaatgaaataacactgtgataaaagccatccctgatgttcacaatacacaatttattaactaagtttaaactataaattatcttaactgccatgagcggtggctcacacctacaatctcagcattttgggaggccgaggccgttggaccacctgaggtcaggagatcgagaccagcctggccaatatggtgaaaccccatctctattaaaaatacaagaattagccggtcgtggtggtacatggctgtagtcctagctattcagcaggctgaggcaggagcatcgcttgaacccaggaggcagaggttgcagtgagccgagatggtgccactgcactccagcctgggatgacagagcgagactccatctcaaaaaaaaaaaaaaaaaaaaaattgaacagcaaggttatccatataatatttctttaaagggtacaagaattttcctttctgcctctaaataaaggatttcctaattcagtgtgatccttaacagcaaccatgaggattactgagtgcctttctggggccttttgaatgctgtttggtacagcaccagagtccctactagatctagagttggctgctatagttttttgtggcgattttttgccatggagtcatttgaacctcatacacaatcctaacatgccatcccctttctgtcatagcaggtacactaaaatttctttgtagctcaattttatataatcaagatcacataaataaggcttccatgttagaatcgttgcagtttttagtgtattcctttttggaggctaaagttgtaccttataaactgtttctgcgtctggcatttagcaagacaagttatttgggttttctttccctcctcttgagctctcagccttctgactacaaggtttggcttaagccttataatctaaaaaatatcagccaggctattctatcttctaagacctggctgaatcatgagccagttctaaatctaaagagagtgagagagggaagaaatctggcacaaacttacagtctctttaattacatgtaaaatgcatgtgactgtattacctattggcttagccccatggagggtttagaaaaatgtgtagtctttgtggaagctatccaattatccttctcccaaaaagatgttttaaatgtggaatagtattacattcccctgcccctttatgagtccttcataacttactaaagctgaccaattgttatttatgtaacctggctcattcattgtcaactaagaacctaattatatgcaatttattgtaaaaaaagctataaaaatatattttgctagtattttagaggaaaaatgatattgggcacagtctataaatggggagaaaagttaagtagtatctagattccaaggatactatatttattatacagatatgtgtgcctgtgcttccatcaaaccctttttcaggtatctccttttaattcataaggaggaaagagtagggcatttataaagctaagctaaaaatgatgctaagcataacgtagatgagacgccaggctgaaccaggggaaggctggcattgttagtgtccccaactagcagtccacctttatctgtggcagctataaatgtacaggacccatcagagtcctaagaaaatgagagtaattatctctggcatcatccacatttccgactctttccaatctcttttccctttttctgtaatgtacccagcatccccctattgtattttggttgcccaagattcttgattctttgagtgtgtagtagcatttcttaaaatgagatcatcagaccaacccttgattcacatgaaagctgtaatgacacaacaaagagaaggcgacagttttaaagtataattgtcagccaaatgtgtattttatatttggttcatagaatatatctagatgtggggaaagtctcctatttggtaatttagttaaaatgtaaatgttatatcacagcatatgttggtatgttttggagtgtgcttccattgtgctcagcttttgaaaagtttgaaatccactttagtcaaatgtagtcaatgggatttccagagatacatattgtttttcttagtgtaccacacactccttgaaggcagatactgtacttaatatatcactgtcttccataatactgccctaggtctttttagtttttaagagaccgggtctcgctatgtttcccatgctgaactcaaatgcctgggcttaagcaatcctcccacctcagcctctggagtagctgggactacaggggcatgcaccaccaggcctggcttcctaggagggtctttaaagagaaaatatttgttcaattgaaaacaggattcttgtcatctacaactccaacacagcctgaaaatatccacattataacctggaccttagacctactttctccactatcctgcaaagctacatctgtaactacctattggctatctatatgagtcctcaagcatctcagactttacatgaataaaactcaacttccttcccattcaaatctgtttattttcttctgtaagagaaagataccatttgagactccagaatctgcctctaactctcaacaagactctgcaattactcaagtatcctttccatcctcattgccctgctgttattacataggccctggttcaagtccttgttacttgttcccattattgcaataacttctaattccaatgccgttgtgtgatcccattttaaacacggccagagcagtcttccaacaacatagctctaatctagtttcatccccacttttacatgcctcagtggctttcccagtgacttggcatggaacacgtcctcagttgccatacattccagctaactcttacccaacctttctttgttcacacagtttccttttccttcctcattgacccatccgcatctctgtttatccaagacttctctgtgatagctgacccttagtctttctctcccctattcctccagactagatcctgtctccttcctgcagccccgacacagccttcagttcatatcttttgcatgatgcttagcaccttctatccctaaggacaacttactcatttgagatttctggcagggtaccttgcatgcagtggacactcagtatttgctgaattaaattccttcctatggatcccttctgattttttttaagtgcctctaatacacatatcattctagggctcatgccacttttaatgtcattttctaaaggaaaatcttatctatgatattttcccttataagagatagttgttttgagtagggttttttaaaagataaaggtagtaggaaattttttaaagcctaaatatcaaattcctttccctttggagttgggggaaggaatgaagggggagcaacttgctctttcatatgagttggtcatagcatgtaagaaccaatcttgaaatatcgttttttttttaatggcttataatgtatttctagaaatactttgtacttaaaatgataacagtttgtatctttttgtccatatatactttataaataaaaaaattagcattgtaaataatgttaatatgtatttatacaaaataaatttactataatata

SEQ ID NO: 328 - protein, 1430 aa, Homo Sapiens
MTSAAEIKKPPVAPKPKFVVANNKPAPPPIAPKPDIVISSVPQSTKKMKPAIAPKPKVLKTSPVREIGQSPSRKIMLNLEGHKQELAESTDNFNCKYEGNQSNDYISPMCSCSSECIHKLGHRENLCVKQLVLEPLEMNENLENSKIDETLTIKTRSKCDLYGEKAKNQGGVVLKASVLEEELKDALIHQMPPFISAQKHRPTDSPEMNGGCNSNGQFRIEFADLSPSPSSFEKVPDHHSCHLQLPSDECEHFETCQDDSEKSNNCFQSSELEALENGKRSTLISSDGVSKKSEVKDLGPLEIHLVPYTPKFPTPKPRKTRTARLLRQKCVDTPSESTEEPGNSDSSSSCLTENSLKINKISVLHQNVLCKQEQVDKMKLGNKSELNMESNSDAQDLVNSQKAMCNETTSFEKMAPSFDKDSNLSSDSTTVDGSSMSLAVDEGTGFIRCTVSMSLPKQLKLTCNEHLQSGRNLGVSAPQMQKESVIKEENSLRIVPKKPQRHSLPATGVLKKAASEELLEKSSYPSSEEKSSEKSLERNHLQHLCAQNRGVSSSFDMPKRASEKPVWKLPHPILPFSGNPEFLKSVTVSSNSEPSTALTKPRAKSLSAMDVEKCTKPCKDSTKKNSFKKLLSMKLSICFMKSDFQKFWSKSSQLGDTTTGHLSSGEQKGIESDWQGLLVGEEKRSKPIKAYSTENYSLESQKKRKKSRGQTSAANGLRAESLDDQMLSRESSSQAPYKSVTSLCAPEYENIRHYEEIPEYENLPFIMAIRKTQELEWQNSSSMEDADANVYEVEEPYEAPDGQLQLGPRHQHSSSGASQEEQNDLGLGDLPSDEEEIINSSDEDDVSSESSKGEPDPLEDKQDEDNGMKSKVHHIAKEIMSSEKVFVDVLKLLHIDFRDAVAHASRQLGKPVIEDRILNQILYYLPQLYELNRDLLKELEERMLHWTEQQRIADIFVKKGPYLKMYSTYIKEFDKNIALLDEQCKKNPGFAAVVREFEMSPRCANLALKHYLLKPVQRIPQYRLLLTDYLKNLIEDAGDYRDTQDALAVVIEVANHANDTMKQGDNFQKLMQIQYSLNGHHEIVQPGRVFLKEGILMKLSRKVMQPRMFFLFNDALLYTTPVQSGMYKLNNMLSLAGMKVRKPTQEAYQNELKIESVERSFILSASSATERDEWLEAISRAIEEYAKKRITFCPSRSLDEADSENKEEVSPLGSKAPIWIPDTRATMCMICTSEFTLTWRRHHCRACGKIVCQACSSNKYGLDYLKNQPARVCEHCFQELQKLDHQHSPRIGSPGNHKSPSSALSSVLHSIPSGRKQKKIPAALKEVSANTEDSSMSGYLYRSKGNKKPWKHFWFVIKNKVLYTYAASEDVAALESQPLLGFTVIQVKDENSESKVFQLLHKNMLFYVFKAEDAHSAQKWIEAFQEGTIL

SEQ ID NO: 329 - DNA, 6932 bp, Homo Sapiens
gcatttaaaagacagcgtgagactcgcgccctccggcacggaaaaggccaggcgacaggtgtcgcttgaaaagactgggcttgtccttgctggtgcatgcgtcgtcggcctctgggcagcaggtttacaaaggaggaaaacgacttcttctagatttttttttcagtttcttctataaatcaaaacatctcaaaatggagacctaaaatccttaaagggacttagtctaatctcgggaggtagttttgtgcatgggtaaacaaattaagtattaactggtgttttactatccaaagaatgctaattttataaacatgatcgagttatataaggtataccataatgagtttgattttgaatttgatttgtggaaataaaggaaaagtgattctagctggggcatattgttaaagcatttttttcagagttggccaggcagtctcctactggcacattctcccattatgtagaatagaaatagtacctgtgtttgggaaagattttaaaatgagtgacagttatttggaacaaagagctaataatcaatccactgcaaattaaagaaacatgcagatgaaagttttgacacattaaaatacttctacagtgacaaagaaaaatcaagaacaaagctttttgatatgtgcaacaaatttagaggaagtaaaaagataaatgtgatgattggtcaagaaattatccagttatttacaaggccactgatattttaaacgtccaaaagtttgtttaaatgggctgttaccgctgagaatgatgaggatgagaatgatggttgaaggttacattttaggaaatgaagaaacttagaaaattaatataaagacagtgatgaatacaaagaagatttttataacaatgtgtaaaatttttggccagggaaaggaatattgaagttagatacaattacttacctttgagggaaataattgttggtaatgagatgtgatgtttctcctgccacctggaaacaaagcattgaagtctgcagttgaaaagcccaacgtctgtgagatccaggaaaccatgcttgcaaaccactggtaaaaaaaaaaaaaaaaaaaaaaaaaagccacagtgacttgcttattggtcattgctagtattatcgactcagaacctctttactaatggctagtaaatcataattgagaaattctgaattttgacaaggtctctgctgttgaaatggtaaatttattattttttttgtcatgataaattctggttcaaggtatgctatccatgaaataatttctgaccaaaactaaattgatgcaatttgattatccatcttagcctacagatggcatctggtaacttttgactgttttaaaaaataaatccactatcagagtagatttgatgttggcttcagaaacatttagaaaaacaaaagttcaaaaatgttttcaggaggtgataagttgaataactctacaatgttagttctttgagggggacaaaaaatttaaaatctttgaaaggtcttattttacagccatatctaaattatcttaagaaaatttttaacaaagggaatgaaatatatatcatgattctgtttttccaaaagtaacctgaatatagcaatgaagttcagttttgttattggtagtttgggcagagtctctttttgcagcacctgttgtctaccataattacagaggacatttccatgttctagccaagtatactattagaataaaaaaacttaacattgagttgcttcaacagcatgaaactgagtccaaaagaccaaatgaacaaacacattaatctctgattatttattttaaatagaatatttaattgtgtaagatctaatagtatcattatacttaagcaatcatattcctgatgatctatgggaaataactattatttaattaatattgaaaccaggttttaagatgtgttagccagtcctgttactagtaaatctctttatttggagagaaattttagattgttttgttctccttattagaaggattgtagaaagaaaaaaatgactaattggagaaaaattggggatatatcatatttcactgaattcaaaatgtcttcagttgtaaatcttaccattattttacgtacctctaagaaataaaagtgcttctaattaaaatatgatgtcattaattatgaaatacttcttgataacagaagttttaaaatagccatcttagaatcagtgaaatatggtaatgtattattttcctcctttgagttaggtcttgtgcttttttttcctggccactaaatttcacaatttccaaaaagcaaaataaacatattctgaatatttttgctgtgaaacacttgacagcagagctttccaccatgaaaagaagcttcatgagtcacacattacatctttgggttgattgaatgccactgaaacattctagtagcctggagaagttgacctacctgtggagatgcctgccattaaatggcatcctgatggcttaatacacatcactcttctgtgaagggttttaattttcaacacagcttactctgtagcatcatgtttacattgtatgtataaagattatacaaaggtgcaattgtgtatttcttccttaaaatgtatcagtataggatttagaatctccatgttgaaactctaaatgcatagaaataaaaataataaaaaatttttcattttggcttttcagcctagtattaaaactgataaaagcaaagccatgcacaaaactacctccctagagaaaggctagtcccttttcttccccattcatttcattatgaacatagtagaaaacagcatattcttatcaaatttgatgaaaagcgccaacacgtttgaactgaaatacgacttgtcatgtgaactgtaccgaatgtctacgtattccacttttcctgctggggttcctgtctcagaaaggagtcttgctcgtgctggtttctattacactggtgtgaatgacaaggtcaaatgcttctgttgtggcctgatgctggataactggaaaagaggagacagtcctactgaaaagcataaaaagttgtatcctagctgcagattcgttcagagtctaaattccgttaacaacttggaagctacctctcagcctacttttccttcttcagtaacaaattccacacactcattacttccgggtacagaaaacagtggatatttccgtggctcttattcaaactctccatcaaatcctgtaaactccagagcaaatcaagatttttctgccttgatgagaagttcctaccactgtgcaatgaataacgaaaatgccagattacttacttttcagacatggccattgacttttctgtcgccaacagatctggcaaaagcaggcttttactacataggacctggagacagagtggcttgctttgcctgtggtggaaaattgagcaattgggaaccgaaggataatgctatgtcagaacacctgagacattttcccaaatgcccatttatagaaaatcagcttcaagacacttcaagatacacagtttctaatctgagcatgcagacacatgcagcccgctttaaaacattctttaactggccctctagtgttctagttaatcctgagcagcttgcaagtgcgggtttttattatgtgggtaacagtgatgatgtcaaatgcttttgctgtgatggtggactcaggtgttgggaatctggagatgatccatgggttcaacatgccaagtggtttccaaggtgtgagtacttgataagaattaaaggacaggagttcatccgtcaagttcaagccagttaccctcatctacttgaacagctgctatccacatcagacagcccaggagatgaaaatgcagagtcatcaattatccattttgaacctggagaagaccattcagaagatgcaatcatgatgaatactcctgtgattaatgctgccgtggaaatgggctttagtagaagcctggtaaaacagacagttcagagaaaaatcctagcaactggagagaattatagactagtcaatgatcttgtgttagacttactcaatgcagaagatgaaataagggaagaggagagagaaagagcaactgaggaaaaagaatcaaatgatttattattaatccggaagaatagaatggcactttttcaacatttgacttgtgtaattccaatcctggatagtctactaactgccggaattattaatgaacaagaacatgatgttattaaacagaagacacagacgtctttacaagcaagagaactgattgatacgattttagtaaaaggaaatattgcagccactgtattcagaaactctctgcaagaagctgaagctgtgttatatgagcatttatttgtgcaacaggacataaaatatattcccacagaagatgtttcagatctaccagtggaagaacaattgcggagactacaagaagaaagaacatgtaaagtgtgtatggacaaagaagtgtccatagtgtttattccttgtggtcatctagtagtatgcaaagattgtgctccttctttaagaaagtgtcctatttgtaggagtacaatcaagggtacagttcgtacatttctttcatgaagaagaaccaaaacatcgtctaaactttagaattaatttattaaatgtattataactttaacttttatcctaatttggtttccttaaaatttttatttatttacaactcaaaaaacattgttttgtgtaacatatttatatatgtatctaaaccatatgaacatatattttttagaaactaagagaatgataggcttttgttcttatgaacgaaaaagaggtagcactacaaacacaatattcaatcaaaatttcagcattattgaaattgtaagtgaagtaaaacttaagatatttgagttaacctttaagaattttaaatattttggcattgtactaataccgggaacatgaagccaggtgtggtggtatgtgcctgtagtcccaggctgaggcaagagaattacttgagcccaggagtttgaatccatcctgggcagcatactgagaccctgcctttaaaaacaaacagaacaaaaacaaaacaccagggacacatttctctgtcttttttgatcagtgtcctatacatcgaaggtgtgcatatatgttgaatgacattttagggacatggtgtttttataaagaattctgtgagaaaaaatttaataaagcaacaaaaattactcttattcttcattgctttatttcaatgacattggatagtttagtcactcccagactctttccataccttcttaaagcctctcaaatattgaactacagtttatactccttcccataagatgcttcttcattgacacttgtagaacacggggtcaacacatcataaaatctattatggaatgcctgagacaagaatcaaacagtccctttagtaagtttgtttattcacttctctattgattcattcaagaagtctcatgccagccccacctattggaagaaggtctgagttttattcttatctctttggtattaattctgaaacttagaaagtacactggttagcaatgcttgggaccaacaggttgttctggtaaataaatctgtttcatattgtcagtgcaacaaaatgtccccctctgcattatgttattggtactcaacacgtccgagtcataactctgtcctttgcttcttatagaggtattaggtcttcaagagcagaagtaagactgtaatagggaatactcaggggaaggcaggcaaaggctagtcatctaaaccagttctagatgtctgtataggggcagatggctctgtaagggcagaagggaaagaccccttcataagggtcacagctgacaatcctataacaaaagacaggttaacaagagaaaaacttaacaaatttatttaatcacagatttacatcaccggggagccttcgtaatgaagatccaaaattacaggggaaactgtgcatttttatgcttaggtttgataatgaatggacagccctgaagaatagtgattggaaaaaaaggatatgatctaatgggaatagacacaggttggggacccagcaaggcctgtctgttcagattattcttggtctctgtgcagcattccttcctcctggatatagggcagggcctgtatgggatggggatattataacctgctatcaagcaaggtaggtcagagaatttatttatggccagctcttacatagttaggtgaggaaagattagagtactatctttaagatgtaagtctggcattgtggaaagatggttccagtttctatgacctaccttggggaagaggaattcaagtttctgtggcttgccttcagggagaatgaggctgagacaggagggcaggataacatcagagaaaaactttgcttctgaggccttcactttgggttttctgagccccaacatctgctagtgttgtaaagagaacaattagggaccaagtgaggggaggaaagaatccatctctgcattctgatgctgggagacttatttccttgaaatgcaattgattttgcctctgctaagaggctctgctggctacccatgtactagccagtgtcctgcatgggtgctaggctgaattatttgtaattgtgcttaggtgatttgtaactcaggtatagggtatttaaatagtaggcaccctttttgcaccatgtgtttttttttttatctagttcttgtatactacagataatatttgaactttgtcatctcactgtaaaacttttgttcatttctcattatggtaataaatagctattataaccaacccatttattcaaatatgttatttccctaagtgttattttgacattttgttttggaaaaaataaatcaccatagataataaaaaaaaaaaaaaaaaaaaaaa

SEQ ID NO: 330 - protein, 604 aa, Homo Sapiens
MNIVENSIFLSNLMKSANTFELKYDLSCELYRMSTYSTFPAGVPVSERSLARAGFYYTGVNDKVKCFCCGLMLDNWKRGDSPTEKHKKLYPSCRFVQSLNSVNNLEATSQPTFPSSVTNSTHSLLPGTENSGYFRGSYSNSPSNPVNSRANQDFSALMRSSYHCAMNNENARLLTFQTWPLTFLSPTDLAKAGFYYIGPGDRVACFACGGKLSNWEPKDNAMSEHLRHFPKCPFIENQLQDTSRYTVSNLSMQTHAARFKTFFNWPSSVLVNPEQLASAGFYYVGNSDDVKCFCCDGGLRCWESGDDPWVQHAKWFPRCEYLIRIKGQEFIRQVQASYPHLLEQLLSTSDSPGDENAESSIIHFEPGEDHSEDAIMMNTPVINAAVEMGFSRSLVKQTVQRKILATGENYRLVNDLVLDLLNAEDEIREEERERATEEKESNDLLLIRKNRMALFQHLTCVIPILDSLLTAGIINEQEHDVIKQKTQTSLQARELIDTILVKGNIAATVFRNSLQEAEAVLYEHLFVQQDIKYIPTEDVSDLPVEEQLRRLQEERTCKVCMDKEVSIVFIPCGHLVVCKDCAPSLRKCPICRSTIKGTVRTFLS

SEQ ID NO: 331 - DNA, 9454 bp, Homo Sapiens
cacacagtgatttctgttatggcgattgggcggctgcagagaccaggactcagttcccctgccctagtctgagcctagtgggtgggactcagctcagagtcagttttccagaagcaggtttcagtgcagagttttcctacacttttcctgcgctagagcagcgagcagcctggaacagacccaggcggaggacacctgtgggggagggagcgcctggaggagcttagagaccccagccgggcgtgatctcaccatgtgcggatttgcgaggcgcgccctggagctgctagagatccggaagcacagccccgaggtgtgcgaagccaccaagactgcggctcttggagaaagcgtgagcagggggccaccgcggtctccgcgcctgtctgcaccctgtcgcctgagctgcctgacagtgacaatgacatcccagttaccagtgtccttgaattgatagtggcttctgtttgtcagtctcatataagaactacagctcatcaggaggagatcgcagcagggtaagagacaccaacaccatgttctgcacgaagctcaaggatctcaagatcacaggagagtgtcctttctccttactggcaccaggtcaagttcctaacgagtcttcagaggaggcagcaggaagctcagagagctgcaaagcaaccgtgcccatctgtcaagacattcctgagaagaacatacaagaaagtcttcctcaaagaaaaaccagtcggagccgagtctatcttcacactttggcagagagtatttgcaaactgattttcccagagtttgaacggctgaatgttgcacttcagagaacattggcaaagcacaaaataaaagaaagcaggaaatctttggaaagagaagactttgaaaaaacaattgcagagcaagcagttgcagcaggagttccagtggaggttatcaaagaatctcttggtgaagaggtttttaaaatatgttacgaggaagatgaaaacatccttggggtggttggaggcacccttaaagattttttaaacagcttcagtacccttctgaaacagagcagccattgccaagaagcaggaaaaaggggcaggcttgaggacgcctccattctatgcctggataaggaggatgattttctacatgtttactacttcttccctaagagaaccacctccctgattcttcccggcatcataaaggcagctgctcacgtattatatgaaacggaagtggaagtgtcgttaatgcctccctgcttccataatgattgcagcgagtttgtgaatcagccctacttgttgtactccgttcacatgaaaagcaccaagccatccctgtcccccagcaaaccccagtcctcgctggtgattcccacatcgctattctgcaagacatttccattccatttcatgtttgacaaagatatgacaattctgcaatttggcaatggcatcagaaggctgatgaacaggagagactttcaaggaaagcctaattttgaagaatactttgaaattctgactccaaaaatcaaccagacgtttagcgggatcatgactatgttgaatatgcagtttgttgtacgagtgaggagatgggacaactctgtgaaaaaatcttcaagggttatggacctcaaaggccaaatgatctacattgttgaatccagtgcaatcttgtttttggggtcaccctgtgtggacagattagaagattttacaggacgagggctctacctctcagacatcccaattcacaatgcactgagggatgtggtcttaataggggaacaagcccgagctcaagatggcctgaagaagaggctggggaagctgaaggctacccttgagcaagcccaccaagccctggaggaggagaagaaaaagacagtagaccttctgtgctccatatttccctgtgaggttgctcagcagctgtggcaagggcaagttgtgcaagccaagaagttcagtaatgtcaccatgctcttctcagacatcgttgggttcactgccatctgctcccagtgctcaccgctgcaggtcatcaccatgctcaatgcactgtacactcgcttcgaccagcagtgtggagagctggatgtctacaaggtggagaccattggcgatgcctattgtgtagctgggggattacacaaagagagtgatactcatgctgttcagatagcgctgatggccctgaagatgatggagctctctgatgaagttatgtctccccatggagaacctatcaagatgcgaattggactgcactctggatcagtttttgctggcgtcgttggagttaaaatgccccgttactgtctttttggaaacaatgtcactctggctaacaaatttgagtcctgcagtgtaccacgaaaaatcaatgtcagcccaacaacttacagattactcaaagactgtcctggtttcgtgtttacccctcgatcaagggaggaacttccaccaaacttccctagtgaaatccccggaatctgccattttctggatgcttaccaacaaggaacaaactcaaaaccatgcttccaaaagaaagatgtggaagatggcaatgccaattttttaggcaaagcatcaggaatagattagcaacctatatacctatttataagtctttggggtttgactcattgaagatgtgtagagcctctgaaagcactttagggattgtagatggctaacaagcagtattaaaatttcaggagccaagtcacaatctttctcctgtttaacatgacaaaatgtatgtactcacttcagtacttcagctcttcaagaaaaaaaaaaaaaaccttaaaaagctacttttgtgggagtatttctattatataaccagcacttactacctgtactcaaaattcagcaccttgtacatatatcagataattgtagtcaattgtacaaactgatggagtcacctgcaatctcatatcctggtggaatgccatggttattaaagtgtgtttgtgatagtgtcgtcaaaaaaaaggtttttgaatagaaattacattctttgacaccctcagttctttcaaactttcaactctgcattttattgcattttctcatttaactgttagtatatgtttgaatataggctgactttttttctctattgcactttcttctttttttctttttagaaaataagcaattaggggttagatgcaatatgaatataaaatagttctgtaaataccaaatattatttttagttctggaagttaaaaatactctccatagtaacgtgtgttataataataaatatttcttttgtttgacttttttaaaattctacaatggtaaaagctattttaatccatgttagcaatttaattcctattaattcattttactatcataatagcaaagtattcagaataaaagaggtttatatcttctattaaaatgcagtaatactattcaaatctaatttagctggaagcaacatgggagtaaagtaatcatccaggggacccaccataaaggacattggtaaaacatttacacacgtaaacacacgtgcaggcacacttggaacaatatggacccacttcagcagacatcttctattgccatgctgagctgtttaaagttttaagaagaaaatctaagtatggaagtagaaaataagacttgttcttttggtggatatctcatttttcttgagtatttgtgctgaacattttggtgtatgtctatgaactaagaatcaagtttttgtctcattaaatatacatatatgaagtgtttttattctacttgaaatatcttgacttaaaaaaaacgactgttagtattgatgaagcaaatgaggcagtgactacattatggaaatgtctaagtattttttccggaacttcaactttttctttttgttttacataaacatttaagcagctaggaacttttagttttagttaggtcagttgaagttctctggtgaactaaaaaatctacattttggttggggataaagatttgattttaaaaacagcttgaatttaaagcaagaaaaagatgaacgttatagttttaaaatcaatattagcagagccatagataggctgagctcttatttggggttctgagaaataactcagtttaaaacttctttaactgcctcccttagtacccaggctagcccatggtgacatcagggatattcattactgattggcctctagtattccaagggtactactatagatattacaatgatgctgtttactaagtgataaccccgtatcttacaggactgactttgactcaataaaccactcagcctattattggaaagtgccataggccttgagaaagtatagttacatcctcacaaatatatgaagttaagtcactacttacaaggaaaaaaaatgtaaatacatttttctttctggaaccgaactcttattatggggaaataatagaaataaagaaaatgtaaaagcatgaaatggaatgtagtcttgatcaaacatttcagcagacctcaatttgcttacaatctgtactcaaaaagtttataattcaatcagaattcaaaaagtattttgtgtgtttgtgatgtattagcatatacacaaaacaaatgaggggaatgtatataatcttggtgaaaagttgtatgggagttttttgtacgattcctgcaacttttctataaacgtggcattatatctaaataaaaaattaccaaaaaacatattttcacagtgaagttaaatcatctgtgataggttccccagaccagcctacaaaggcccattaaatacagaataatttgtggatcttcaaagaggatgaacatacatttccatgacagagtccatacgaaattcacaatttagatgctaaaaaatttaaggaatatctttttttctctatcttatctgctttgaagcatagcgattagcgagaaacttttcagatccagaccactgatggtagccagagtagagaccctggagcatagattcttaaaataaataaggggcccaagtcagagctttgaggtattgaagatggaaaaatagtggacaaacagcctgtaatcaggttggggattacgggtactgagttatgttgccatttaactattctaaaaaataagactgggtctcaagactgcttccctaacagactgtttctcctgaaaatgcaggagctattctttctgttctggttatatagtttccattcatggcttcttgtcctgttgttttttgtgtcgagtacactatataaattatctccttatacatatttctcaggcaagcacagagttatactgaacttttctaaagatgctttgcatcaagaagcaaagggaaatacagaattaaaatgtttctttccattttgctttgtttttctatatcgatctagactttgtaggaaaatgcaaagcgtatatttaagaaaacctaaataagaatagattcatttactcattttcatttattcattcatgaagaatttattgaatgcctactatgtgccaggaatattgctatatttttgaaatttaaggataaaatatggcccaatctatcaagaaaggaaagtgaaagacaaatgtaagacataattacaacattctgtgggagcacaaagtaggggactcagttcttagagaagtcttttggtcttagagttcatcaagcagagaaggggaaggacatggtccaggaaaataaatcagcacacaaagagatggggtcttgagggtgcatagtacattctggacagccagttacctgggatgagttgggagggaggagaataaggacaaaagaccatctgggcaaaaatcacgaaggggtatgtgtgtcatgtaaaggtgtgccatgatagttattcatattgctattgtaatattaatatatagtaattaactacacatgacacagctttacatgaccttaagtagttatcaacattaccataatagtaatattaataactacaataagagccattattattcacttgaggcacttgttcaaaatagattttacaaaagaaaaaaaaaaaagaagcaacatgagtaaaattagatccattggctactgactccctctccaacagttttaaagctactagataagagaagcatcaagtcttaaaggaagagaatggtatgatcagatgtgtgttttccaaagactattagaaacagcatggttaaggatagggtggatatttacttgcacaggtgactgaatgaacatctgtttatacatcaagggaaaatgattcattttatatcctggatattttaccataagtatgagcataaagctgggatgtctggcattggaattttatgtcactctcaaggctaattagtctttcagatcctttggtagggaggaaagaagagttgcttcagcattttgactaacatttcttccaaatttcttctccctgatatttccagccacgccaaggcaaagacttcccagctctgtctcaggttaggttaaaagaaggcataggatggaagagggtggtctgtggtaggcctagcaaatgaaagagatgaataaacaagagtgtctagtctaactagtgcctgaggaatagacatcagtcctctgagattacccagctggaaaactgcccagatggagctttacatgcaaagctccagtgaagtctagtgctgtataatgctttaaatccacaatcaagcccttgttgatgcaaatgttagtcgcccaaagcagaatgggttaacgaattactgcagtggttttaggtgcatgggtttgacccatgtaaatcattttaataagtaaaattgaatctttgatacatatttgttgaggagcttgtcagatcactacctttcactgaacagtaaaacatggatcatttatttcacctcattttgcacttcaatgcaatttcactctttaggtggttgtacttggacagttaaatgaagactgtctttaagggtgcagggatggagaacacagcatatatgagaggtgggagggcagagacgccttgcgattcctgtgaggagggacttaccgtctcctccaaaacagaaattcagtgctgcagagacggtagcaaagtgcagttctcttgttaaaacacaggctaaaagcagtgactgcttaacttattaagcagagaaaaccaaaatgtcattttcaaccaaaattgagtgttagagtttatggtctctgttatgatacttttcaagacctgggaaatatttgtatcctttagtgaaaaggggaagaatcaattactgaaagccataagcttacagtaacggagccaattaatcctttgtcatctttgttgagtttagttttcttctgttcttagcacgtcagctagtagatctttgatgaactgttgctcctctttaaatgtttcttttattatattgatgatgtgcactcattcagtattcttattttaagctgcagtaatcactgtacatttgattgccatctgtacttcccttgaagcagctttgcttattacagccacacctgcatctgttttgactagcccacataacctacacatttttcatccaaagctatcccattaccttatttatgtccatttattttcatatatagtatctgccaaaatagtagcaaaagttttatcaatgtgtagatttcaatcagaaaaacctaagcaaaaggaaaaaaaagtgatattctaaaagccacacttcttttatcaccagtgcagttttttccatcatcataaacttagttttatgaaaatgttaatatcttggatttaaacattggggtagaaatcaggacaaaatttaaatgtcatatccaggacttaatctcagatattctggtagaagatatttagataaggttgtggctgcctgtcaagttttttaattttttaaattatataatgtcagaaaattaaatcacaaatgagccttccagattgtgaggaaaattacttggctgaaaatgactttgcataatgcccaaatcttgaagtatctgctcagatgtttgttccatctgaaatgctgccaaatccatctgtattgaggaaagagctatgaggtagtttcagagaaagtgaaaacaaaacaaagcaaaacaaaaatgctattacagaagttggacagcccaatgtgttaagtattatacacctggaacaagagcagcaaaactgaagctctttggaaagttatggcaacagtggtctgggaattctgggcctttagaaataatcattcccagtgatacagggatgtgcagcatccagacactgcttaatcacagtgagctgccgtcttccctgaataagttgtatcttataacattgaagtgaatgaaaatgtattagtatttgagaatttactattccttcacctccttgcacatgtaaattaaagatgttttggaaaatatgagaacttgatgttcactgccctagagcactattctccaaccttttagattcctgcaatctgttaataaaatattgtaggacaacaactctatagactgatacatgctgctctcaatccatatactacatattaggacagcttttcttttctaaatgagcatgaatataaatagaaattctagtattttcttcacctaccccagtgaatcatctttatattttacttgggaaactgctacagttggctagtgggtcttcacttttattgctttgagaaatggataaaagacatagactatcacccctccaaaaatgtgcatatggccccatacaagacacatgtactgccagagcttggggaactccctagaatctactcctagaccaccctagtgaagtaccatagaccatattgtctagatgggacaaaataataaattttgactaagaacttactgtttagagagaaaaaatagtaaataatgttcaaaatgagaagacaataactgacaagtctgtgatttttgggttagatgagaccacttttgatttttgaggaataaaaggagttagttttttggtcctgatgtgtaaaatgattcatggggtttcacatacagacaagtagttttcttttcagcaaatatttaacatatctctcaatatatttttcaccagtttttggtaaatatgcattgctataggtataccaagttttttttgttatgtttagtaactaatttcattttttctgtatatgtaaatatagctattggaccctgcattgaaaaccttcttagtactaacaacactccttttattattaccttcatagttactttaaatgacatatttatttcgagttttacttctggctgagttgcaaagtctatgagaatgttacctcctgtctcagaagcttgttagttattgtgccacctaaatattgtaataaaagtgtttaaataaaaatcttcttaaaatttaaaatgaaaaaaaaaaaaaaa

SEQ ID NO: 332 - protein, 690 aa, Homo Sapiens
MFCTKLKDLKITGECPFSLLAPGQVPNESSEEAAGSSESCKATVPICQDIPEKNIQESLPQRKTSRSRVYLHTLAESICKLIFPEFERLNVALQRTLAKHKIKESRKSLEREDFEKTIAEQAVAAGVPVEVIKESLGEEVFKICYEEDENILGVVGGTLKDFLNSFSTLLKQSSHCQEAGKRGRLEDASILCLDKEDDFLHVYYFFPKRTTSLILPGIIKAAAHVLYETEVEVSLMPPCFHNDCSEFVNQPYLLYSVHMKSTKPSLSPSKPQSSLVIPTSLFCKTFPFHFMFDKDMTILQFGNGIRRLMNRRDFQGKPNFEEYFEILTPKINQTFSGIMTMLNMQFVVRVRRWDNSVKKSSRVMDLKGQMIYIVESSAILFLGSPCVDRLEDFTGRGLYLSDIPIHNALRDVVLIGEQARAQDGLKKRLGKLKATLEQAHQALEEEKKKTVDLLCSIFPCEVAQQLWQGQVVQAKKFSNVTMLFSDIVGFTAICSQCSPLQVITMLNALYTRFDQQCGELDVYKVETIGDAYCVAGGLHKESDTHAVQIALMALKMMELSDEVMSPHGEPIKMRIGLHSGSVFAGVVGVKMPRYCLFGNNVTLANKFESCSVPRKINVSPTTYRLLKDCPGFVFTPRSREELPPNFPSEIPGICHFLDAYQQGTNSKPCFQKKDVEDGNANFLGKASGID

SEQ ID NO: 333 - DNA, 3859 bp, Homo Sapiens
ctaggcggcggcggccgggtccccaaggctgggcgctgcttgcggaaccgacggggcggagaggagcgtggcgggaggaggagtaggagaagggggctggtcaagggaagtgcgacgtgtctgcggagcctttttatacctccttcccgggagtccggcagccgctgctgctgctgctgctgctgctgccgccgccgccgccgccgtccctgcgtccttcggtctctgctcccgggacccgggctccgccgcagccagccagcatgtcggggatcaagaagcaaaagacggagaaccagcagaaatccaccaatgtagtctatcaggcccaccatgtgagcaggaataagagagggcaagtggttggaacaaggggtgggttccgaggatgtaccgtgtggctaacaggtctctctggtgctggaaaaacaacgataagttttgccctggaggagtaccttgtctcccatgccatcccttgttactccctggatggggacaatgtccgtcatggccttaacagaaatctcggattctctcctggggacagagaggaaaatatccgccggattgctgaggtggctaagctgtttgctgatgctggtctggtctgcattaccagctttatttctccattcgcaaaggatcgtgagaatgcccgcaaaatacatgaatcagcagggctgccattctttgaaatatttgtagatgcacctctaaatatttgtgaaagcagagacgtaaaaggcctctataaaagggccagagctggggagattaaaggatttacaggtattgattctgattatgagaaacctgaaactcctgagcgtgtgcttaaaaccaatttgtccacagtgagtgactgtgtccaccaggtagtggaacttctgcaagagcagaacattgtaccctatactataatcaaagatatccacgaactctttgtgccggaaaacaaacttgaccacgtccgagctgaggctgaaactctcccttcattatcaattactaagctggatctccagtgggtccaggttttgagcgaaggctgggccactcccctcaaaggtttcatgcgggagaaggagtacttacaggttatgcactttgacaccctgctagatgatggcgtgatcaacatgagcatccccattgtactgcccgtctctgcagaggataagacacggctggaagggtgcagcaagtttgtcctggcacatggtggacggagggtagctatcttacgagacgctgaattctatgaacacagaaaagaggaacgctgttcccgtgtttgggggacaacatgtacaaaacacccccatatcaaaatggtgatggaaagtggggactggctggttggtggagaccttcaggtgctggagaaaataagatggaatgatgggctggaccaataccgtctgacacctctggagctcaaacagaaatgtaaagaaatgaatgctgatgcggtgtttgcattccagttgcgcaatcctgtccacaatggccatgccctgttgatgcaggacactcgccgcaggctcctagagaggggctacaagcacccggtcctcctactacaccctctgggcggctggaccaaggatgacgatgtgcctctagactggcggatgaagcagcacgcggctgtgctcgaggaaggggtcctggatcccaagtcaaccattgttgccatctttccgtctcccatgttatatgctggccccacagaggtccagtggcactgcaggtcccggatgattgcgggtgccaatttctacattgtggggagggaccctgcaggaatgccccatcctgaaaccaagaaggatctgtatgaacccactcatgggggcaaggtcttgagcatggcccctggcctcacctctgtggaaatcattccattccgagtggctgcctacaacaaagccaaaaaagccatggacttctatgatccagcaaggcacaatgagtttgacttcatctcaggaactcgaatgaggaagctcgcccgggaaggagagaatcccccagatggcttcatggcccccaaagcatggaaggtcctgacagattattacaggtccctggagaagaactaagcctttggctccagagtttctttctgaagtgctctttgattaccttttctatttttatgattagatgctttgtattaaattgcttctcaatgatgcattttaatcttttataatgaagtaaaagttgtgtctataattaaaaaaaaatatatatatatacacacacacatatacatacaaagtcaaactgaagaccaaatcttagcaggtaaaagcaatattcttatacatttcataataaaattagctctatgtattttctactgcacctgagcaggcaggtcccagatttcttaaggctttgtttgaccatgtgtctagttacttgctgaaaagtgaatatattttccagcatgtcttgacaacctgtactcttccaatgtcatttatcagttgtaaaatatatcagattgtgtcctcttctgtacaattgacaaaaaaaaaaatttttttttctcactctaaaagaggtgtggctcacatcaagattcttcctgatattttacctcatgctgtacaaagccttaatgttgtaatcatatcttacgtgttgaagacctgactggagaaacaaaatgtgcaataacgtgaattttatcttagagatctgtgcagcctatttctgtcacaaaagttatattgtctaataagagaagtcttaatggcctctgtgaataatgtaactccagttacacggtgacttttaatagcatacagtgatttgatgaaaggacgtcaaacaatgtggcgatgtcgtggaaagttatctttcccgctctttgctgtggtcattgtgtcttgcagaaaggatggccctgatgcagcagcagcgccagctgtaataaaaaataattcacactatcagactagcaaggcactagaactggaaaagaccacagaaaacaaagaatccaaccctttcatcttacaggtgaacaaactgtgatgatgcacatgtatgtgttttgtaagctgtgagcaccgtaacaaaatgtaaatttgccattattaggaagtgctggtggcagtgaagaagcacccaggccacttgactcccagtctggtgccctgtctacaccagacaacacaggagctgggtcagattcccctcagctgcttaacaaagttcctcgaacagaaagtgcttacaaagctgccttctcggatactgaaaggtcgagttttctgaactgcactgattttattgcagttgaaaaaaaaaaaaagctattccaaagatttcaagctgttctgagacatcttctgatggctttacttcctgagaggcaatgtttttactttatgcataattcattgttgccaaggaataaagtgaagaaacagcaccttttaatatataggtctctctggaagagacctaaattagaaagagaaaactgtgacaattttcatattctcattcttaaaaaacactaatcttaactaacaaaagttcttttgagaataagttacacacaatggccacagcagtttgtctttaatagtatagtgcctatactcatgtaatcggttactcactactgcctttaaaaaaaaaaaccagcatatttattgaaaacatgagacaggattatagtgccttaaccgatatattttgtgacttaaaaaatacatttaaaactgctcttctgctctagtaccatgcttagtgcaaatgattatttctatgtacaactgatgcttgttcttattttaataaatttatcagagtgaaaaaaaaaaaaaaaaaa

SEQ ID NO: 334 - protein, 614 aa, Homo Sapiens
MSGIKKQKTENQQKSTNVVYQAHHVSRNKRGQVVGTRGGFRGCTVWLTGLSGAGKTTISFALEEYLVSHAIPCYSLDGDNVRHGLNRNLGFSPGDREENIRRIAEVAKLFADAGLVCITSFISPFAKDRENARKIHESAGLPFFEIFVDAPLNICESRDVKGLYKRARAGEIKGFTGIDSDYEKPETPERVLKTNLSTVSDCVHQVVELLQEQNIVPYTIIKDIHELFVPENKLDHVRAEAETLPSLSITKLDLQWVQVLSEGWATPLKGFMREKEYLQVMHFDTLLDDGVINMSIPIVLPVSAEDKTRLEGCSKFVLAHGGRRVAILRDAEFYEHRKEERCSRVWGTTCTKHPHIKMVMESGDWLVGGDLQVLEKIRWNDGLDQYRLTPLELKQKCKEMNADAVFAFQLRNPVHNGHALLMQDTRRRLLERGYKHPVLLLHPLGGWTKDDDVPLDWRMKQHAAVLEEGVLDPKSTIVAIFPSPMLYAGPTEVQWHCRSRMIAGANFYIVGRDPAGMPHPETKKDLYEPTHGGKVLSMAPGLTSVEIIPFRVAAYNKAKKAMDFYDPARHNEFDFISGTRMRKLAREGENPPDGFMAPKAWKVLTDYYRSLEKN

SEQ ID NO: 335 - DNA, 5561 bp, Homo Sapiens
agggggccgactggcgcggctctggagagcgctcctccgccccgcgcgccgtccctgcgccccgctccgcccgcgcctctctcccagcgccgcgcctcgggcgtaaagagcgcgcccctcgcaccgcagccagtgccgaccgcagcagcccagccccagccttcctccgcctccgcctctctctcctcctcctcctccgccgccggacacgcagccgcaggccgggaccgggacgcagctggggagtcagggacgcgcgcagccagcccttccccctccggctcccgcaccgccggccgcctcccctcgccctcctactctcccctccctgctccttcgctttttcctcctcctcctctcccggccccggctgccagcaccatgtccgcagggggagattttgggaatccactgagaaaattcaagttggtgttcttgggggagcagagcgtcgggaagacgtctctgattacgaggttcatgtacgacagcttcgacaacacataccaggcaaccattgggattgacttcttgtcaaaaaccatgtacttggaggaccgcacggtgcgactgcagctctgggacacagctggtcaggagaggttccgcagcctgatccccagctacatccgggactccacggtggctgtggtggtgtacgacatcacaaatctcaactccttccaacagacctctaagtggatcgacgacgtcaggacagagaggggcagtgatgttatcatcatgctggtgggcaacaagacggacctggctgataagaggcagataaccatcgaggagggggagcagcgcgccaaagaactgagcgtcatgttcattgagaccagtgcgaagactggctacaacgtgaagcagctttttcgacgtgtggcgtcggctctacccggaatggagaatgtccaggagaaaagcaaagaagggatgatcgacatcaagctggacaaaccccaggagcccccggccagcgagggcggctgctcctgctaatgcagagccgacctgtggcttcccatgacactccttgcttgttgtgttgcttcctattggctagcttcctaaggggggagggaaccgagttatcaagatgggaggatttttcttttctctctgtctttaggagtagggtgggatggggagggaggctgggcatcagggatcacatcactcttaacggctgttacttaaacaactattttttggtttggttgtaatatattgtactttattaagattgccaaaaactgttaaaatttaaaaaaaatttaaatcatgtgtatacaattttttgccagataaaaatgtagtcatttttatttgaaagatgtgctttttgtttttgtatatttgtaaacttatagagaaccttttccacacacctcctccttcctgttctctttgaaccattcatcacctctgccttcctcctatccccagcccaataaattaaaacaattaactgagcaaattaattaggcttcagtctggggccatctggccccactctctaggccctactccagttaaatcaaacattggttgaacacatcagcctctgaaaaggtagctctgactcttgtctttccatggccagagtgggtcgtcaacctcgtgtggagctgagaccaaggtctgtgggctctaggcagcccggcagcagcccccagaggaactgctcccacctctccttctctttccctgaaaagccttgaagggggttgagggtacaggcaaccttgtgttctctgtgccctcagggactggcagagcaagaggccatcagaaggacgaggtgctgttggcaattgcagctgcgtggtgcgtggtttatagactggggtgccatgtgtacttctgaaaatattttaaccagcccacccagcagtcagtacacatgcctgggccaagtctaagaaactcagtgtgtgatgttgggcagtgtgccatcctgaagccttcctcctggatgtcagggaagctggaccacctggagttgatcctctgtgatggggaggcgggggggggggggggtgttgtctgcagaaccaccaccttgaaagatccatgttcttagagcctcagctgctaatattgttgagtgctttctggaaaagctgatttgttgctatgttttcaccccagtggcatggcgcagttgaagtctttgtggacatatctttgtggctactgtggctgcgctgtggtcacctgaggatgtggttcaggtggggtctccagaaggctgcttgcccccagagagccatctcttccatttttgattcattcctgagaatggcttagtcctgagaatctgcaaagtctctgaagagaactctctcttcccactaagtgatataacctacttggccagcattccaaatagactcagactcactgccctgagcctgcacagagccaggtgcaatgggcagtgagtctggccaaaatgtaaaccccaccctccctgctgtcattggctctccctccaggctgctgctgggcatgtcatagatgggatgaatgaccatctggggtatggtgggctgaactccacaaggtcgttggaatgaattttgaaacttctcagaaattaatctgaaatggcaggcagtaagtgcagcagaatctggcaggactgatatttgtgcagtgggcctgccacacaccctctgcctaggaggctgtatgccagagctcatctctagcaaggaatttatcttcaggtgaagaagagaggaagcaggatcccactgagcacctcttgcagaaggcaaggaccaatgtttgaacgtgtttcagatgtcatgtgtttagtttttatatgtgtgtacataattatatatagagatagacttgtgtatacaccttccacaaacacatcctcacggagatacatgtgctcaatgtatattcttgtttctcctgctctcaagttggaacttgcattgtgataagttttggaaattcaaaagtactgcaacgtgttgaaataagaaatacttaatattgtcaaataacttgtgattgtcttgccatcaataaaataatgcatagttgtgttaaactacaggcaaacatagcccacgggaatatctccaccatttctctatgtactttatatgcacgggtgtgcatgcctgtgtgggccagtgtccccccaccatgggcacacccccaagtggtgcttgttggaagagtgcttacttacctcgagagaatttacaggagtccacatgacagtgtcctgcctggttggcagcgggggccatcacctgtggcctctgagaccgccccatttacaggaatctgcactgggtctcagtgaatgaacgtatggtagatttttattttcttggcactaaagattagcttttttaaaaaaacatcccataaaacagtagaaactcagttcccttctcaggggcacacacatccaaggcaccgtggactgtgtttccatcctggcctagaggagcagtaaaagatagcatttggtttgacatggccttagtgagtcctgcctttcctagcatgcacacaacatcctctctttgagtttgggttctccccagccccttggcctctgaggctgagggtggcttcctcccatcctcccatctcagtggttccatggcgctcccttcggcacgtgcggtttccgcccctcccttcctggggtgtggaaaggcagccagacctctttttcagaagttgttggttccctgatttttgtcttgagcaggcaccatccctgtccccttgcttgcaggtagaattggcacagagttaaggttccataataaactgttaggtgctcttgaagaagatgtcatggcattgcctcagcaccccagcaagagcattgcatctttgctgaatccagatgggttagcagagggcaaattggaggattcctttgaggaaatgttctcaattgagcaattcagtccctctccccaaagactagacgtgacctggcagattagcaggatcctcttggccttcttttttggggatggtgggagtgaagggggtgaatcttaaaagcttatcaacaaagctcctgttctgcaggcatcaggaaagttgagtgtaagatggaaaaagcaaacagcctatttacaagtggaaacacattggttctgatcactcctaacttgctgggtgatcatacatacatcaacatgaaggtgtgacatcagaatcatgagcaccatggctgcagttgtgtgatccaaggctagttggcttggtagctgttggcagcagtttcccttggtcagaggcctccttgctatctatcgctgctctcttcttgtcatccttaaacattcagtcatgttcccaggtctgaggggagcaatggccagaccagtttcagtatctctggcaacagaaacaaggattgaaatggtggtagttaagagtgcagacacatctggggtgcaacgtctgcatcatcctggtggctagccagtgcggggaggccctgccctgggataccagttgtgacaataaagggatggccctcctggcttcagcatcctgcaggtagagcagcctcattccttcacaagatggaaggcaggtgaggatgtcaggatgagatgggaccaggtagccgaggacagtgaggcatgtctgagccacttgaggggcagctgaacagaaggatgtctgtgtgcatcaaccgagcagattgtgcgcacactcgtttccgaactgcctctccccaaagaatgtgaggcattgtcaccttgttacagctatgtgaagcagagctgtcacaacttttcctgtctacaggcaggaaaaccaggatggagaagggcaacttgcttattaagatcacccagcaagttaggagtgatcagaaccagtgaagtttccatttttcatccattgctgccctgtgtgtgaacaaatgtgactccatatttattacacagcaaggactgctgtgtgtgggtgtgttcctcagaccatctctactctttttggttaggacactaggttcttcccagcatatgagtgagaatattggtggtattttgggctcctctactgcacaagggccagtccccaagtctactctgattgattgtcatgggcacccacacagatcaggacaccctttgaatttttgtttgacatgaactatttaggtgttccaaaaccttgggatctcaatgtgcaaactccttggactccagacccctgtctggttggcactcccagcagtgtgtggtttcatcaggaaatccttgcagcaggggtttagatggttccttcaggaggtgggaagcctccatagcattgaaggccagcctgcatctcgcggtgtgtgtccacttctcccctcactttcccctcacccatccctttaaagtgattggctgtgaggagcacagagggtggcaattccatctgttatgggctcagaagacatagccgccatgttgatttcacattaaactgtgtaaaatgtggaaaagactcagcatgttggtcaaacaataaactgtcctaattctcaaaacaaa

SEQ ID NO: 336 - protein, 208 aa, Homo Sapiens
MSAGGDFGNPLRKFKLVFLGEQSVGKTSLITRFMYDSFDNTYQATIGIDFLSKTMYLEDRTVRLQLWDTAGQERFRSLIPSYIRDSTVAVVVYDITNLNSFQQTSKWIDDVRTERGSDVIIMLVGNKTDLADKRQITIEEGEQRAKELSVMFIETSAKTGYNVKQLFRRVASALPGMENVQEKSKEGMIDIKLDKPQEPPASEGGCSC

SEQ ID NO: 337 - DNA, 8487 bp, Homo Sapiens
ccttcggccccggcggggctctggcgtacccaaaatgcaggccccagcggaacgcacagccctcctgtcctccgccggtgcccctttagccgccccacccccatccctaagggctctcattctccagctgcagccgcagctgggttccgaacacgccgccgggccccgggagggagaggggcaggtgccagggcggcgcgcagcctctgctcccggtgccagcttcagtgcgccgggcacacgcgcgccccgcaacccctccctcaccctttccccgttgctcaatctccgccagccgcggtcgctgcatcgtcagagagctgcaagagggaggcagcaaggtgcggccgccagcagtgacaccatgtgaccggcacggctcactgacacgcagctttggttaaagagcgggcgcacaggaggggaggagaccgcgcgcgggacggggaggaatggcctgtccgcgttaaaccatcacaagccatggttgcggaagggccacgcgtcccccagtaggagaatgactccgattcgtgaccctcagcgccggtgcatgtcgatgtaagtgcgaggccggcgagcagagtgtgagtgggggttggtggtgaggggagattctgatgcaatcggcccggaaaggaggagagccaggcgagcgcggactggggcggccacgccactccgccagaaggtcgccaggagcctccgcccttcaccttcctccgaaatccgccaggccacgccaagctccctgcccaacccttactgacgggggccacattttcccggcctccgcagccagaccttgacacaaaggacatcaaactgccgagggtaaaaaccccggaagggcggacacctccacatcgccttttgccacctttccctttatttccggagatatttattgagtgtctactgtgtgccaggcactatatctatgtgcatagaaaaaccctggaaggccatacaacaatatatatagagtgatcgtctctgcttgctgagctaacaggggtgtcaagcttccattttggtatctacttctaaatacactcagaacaggagaaatttggactaattttcaaactacagacactttctaatcatgatgcatttcaaaagtggactcgaattaactgagttgcaaaacatgacagtgcccgaggatgataacattagcaatgactccaatgatttcaccgaagtagaaaatggtcagataaatagcaagtttatttctgatcgtgaaagtagaagaagtctcacaaacagccatttggaaaaaaagaagtgtgatgagtatattccaggtacaacctccttaggcatgtctgtttttaacctaagcaacgccattatgggcagtgggattttgggactcgcctttgccctggcaaacactggaatcctactttttctggtacttttgacttcagtgacattgctgtctatatattcaataaacctcctattgatctgttcaaaagaaacaggctgcatggtgtatgaaaagctgggggaacaagtctttggcaccacagggaagttcgtaatctttggagccacctctctacagaacactggagcaatgctgagctacctcttcatcgtaaaaaatgaactaccctctgccataaagtttctaatgggaaaggaagagacattttcagcctggtacgtggatggccgcgttctggtggtgatagttacctttggcataattctccctctgtgtctcttgaagaacttagggtatcttggctatactagtggattttccttgagctgtatggtttttttcctaattgtggttatttacaagaaatttcaaattccctgcattgttccagagctaaattcaacaataagtgctaattcaacaaatgctgacacgtgtacgccaaaatatgttaccttcaattcaaagaccgtgtatgctttacccaccattgcatttgcatttgtttgccacccgtcagtcctgccaatttacagtgagcttaaagaccgatcacagaaaaaaatgcagatggtttcaaacatctcctttttcgccatgtttgttatgtacttcttgactgccatttttggctacttgacattctatgacaacgtgcagtccgacctccttcacaaatatcagagtaaagatgacattctcatcctgacagtgcggctggctgtcattgttgctgtgatcctcacagtgccggtgttatttttcacggttcgttcatctttatttgaactggctaagaaaacaaagtttaatttatgtcgtcataccgtggttacctgcatactcttggttgttatcaacttgttggtgatcttcataccctccatgaaggatatttttggagtcgtaggagttacatctgctaacatgcttattttcattcttccttcatctctttatttaaaaatcacagaccaggatggagataaaggaactcaaagaatttgggctgcccttttcttgggcctgggggtgttgttctccttggtcagcattcccttggtcatctatgactgggcctgctcatcgagtagtgacgaaggccactgaaacccgccgagaaaaagaaacatccctgttgtctgctcagtcaagtccccacacatcagcaatctctcaccacttcttttgcaagtttacagaagcaaacagaaatgtacaggatacttaaaatggaataactttttggttgcaaaacagagacatggttctataatgcttcatgtccctccaagatttgagatcaatttagggattgtgaaatttttttttcaaatttcatacaatcatatttcccagtacttttcacaatcattttttacccatctaactctatgttttgtggcttcccggtctcttagaactttgaaaacatgatatacaataatgtttatttattatacatccagattctgaaataattttcctactgatgttcagctcacactatctgtacctttttagaagagaaaagaatcttgaattgtatatatttattttgctttacagaaaaaaatggtttcgtaaataatttgcctattttggttaacatagcacatggagataatcatctgaaagttatagggcactgccactgctgaatcagagcatgcccaatatttgaggtggctctgatttcctggcagctgaactcgggtagtccagtggcctagctggtaccacatctattcccatccagagacattctctggcaagtgttctcagctgaaaagtggttggggatgattcttaccttggtaattaaatgaagctacacatttgggtaatctagcaaatgaagtattttttccctcttggcaacttgtgtcagagttactctggtctgagtcaactttcgctggggaaaacctatggaacctactgcaaaaagattgtccaaaatgcctaagaaaatactcctctgatgcatttagccttcaaccctacctgtcttgctgaagggagaaaaatgttttagtacattataggcccagcagcttttattcatgtccaccagctagttgcacagagaatcatgtgtacctaactaaggatgatctaggataagtaactcctgttttatattgagtattttagggaagtctttaaaagacttgttttatatctataaatctaggttattacaaatacaagaattttgtaccttaaataagcctcatttctatttcttcttcattaattctccatctagtcttgtgaaaaaaaaaaaaaaaaaaccctcagagatagtctttgtgaagagcttctgacagaatcactgagtaccttccttcccccagatgaggaagacaagggggtctcagtgtctgtgctgtctcctcttctcttccccaaccaaggactgtgccattactgcccgtctcaactgtccatgcaggaggacagagttgcctggtactcttacccttgtccctctcctaaagggagcacaaggaaactgaagagactgaaaaagaagagagtttgtagctgaaaaagaatagggatagcaaggaaacccagaactgcattcccctaagtggggccatcccatgtgattgaattgtccatagcttgcctatggtgagaaatgtgcatgctccgtgagctggtctcttgaaacaggacttatgcttcctctatattctggttaaattttccaaacacataagttcactgagcacagatttcttatccagagacaagtagaatctaaccgcagactgttggcagagtttccaggcacttagccatgttcccttcctgactcaaatccccaaaggccttcactctcactgagaatcacactactgtcccatagataaggcaggcattgaagcacctgtcgtgatcctctaggggggagaatgaaaggttatttcctgcattgcatcatcatagcttttaatataatgctacagaatcatatccacattaggttagagttcagatatttggatatgaatacctaacctagccatatccatggccatctctgttcttttcagcaatgttttccatattatattagcaatgacagaaacagaacaagccaagatccagtcagttcttgggagcttgtctagagcaccaagtaatgaaatagccaggtagtgggatgactgtacctttaaaaatacataatttagtttgcaagctatattatgctactttctattttccttgttactttatagcaattcattttaccctcacaaagtcaatttagaaccttatcattaactgggatgtgtagtgatatttttgggcctctgggtttcatgtgtcaatacaaggaatatttatttaaaatagatttatttagaggaggcacagtgttgttgatctgtgtgacaccacccatatttttaaaaacctttgtatgtttctctaaatttgttgttgactgaatataatagaccctaccataattcgtcaaatatcactgattagttacatcctttgtgtgagattagctgtaaagtatactgctcttattcttattcagaatagttaattggtagccaaaaatacatgtatcacagatgttaggtcgaatttaaacagcacagtcaagtgctatggaagtttttctgctaaattagtagattaaagaatactataccctaggcatggggagcagcacgttttcctttggtaggtaggatctctatactagtgaacagtgccagttccacactttggacttagaactgttctctagttattgtaacacagaatactgtcaatccctaatttacttaatgttacttattggaagtggggctgatgaaatacgcacaggagggaaatctactgtgtttaggcacaggcagccccagtgtataaggagatcatattccaaaaggttgtcagttggttgtttgcaacctggaatgtattttcctttagagaccaggttatccatggtggttaggcccctagagcagctggaaaagatgatcaaaccaataggttagctgacatcgaataatgtaataggtttgctaaagaatctaaccatcaaatataatattgtttccagggagggtgtttgttcagagttgcctgttagtagaatctggactgtccatcccagccacatcccacctactggacagtaggggtagagatgccaccagactacaggtgaccagattggcctgaaacatggtgtccagtaaaaacggggaggaataagtccatgactgctggagagcttggtggtaggaggagggtgaaggagggtgagggggcctctcatgggtcagaaacctccagggacatccctcagctggtaactctgctgttgtccggagggttcaggcttggtgtgccttcttctgtttgtctgacttttggctcctatggttcatctcctgccctgcccaccacagaaaaggatgctgctgcatagcttctccaatgtaccagtcattgaggccagcgcgcagcacttttaatgtttttagtgctagtaactgtgttttaactctccaggaataagctgggaggttagaaaacaagaaaaaagggggaaaaaaaaacctctccacccactttccttttttacagttacagaccctgttgagaaaaagaagcacccagatgggtgatggtgatagggcttgtggtggacacagggttgtggtaagattcctcagtgcttcggcgagcacctaagactattaccctggaactgactgctttctagagcttgattcatgcctctaagccagtggttctcaaagtgtggcccctagaccagtagcatcagcatcatcggggacctcattagaatgcagattctcagccccctcccagacatggtgaagtcagaagctctcagggagggactcagcaaatgattctaaagcgcatcaagtttgagaaccaccctaagccaatgagtctcccttttacttcccattagtcctccctcaccagatgattcctaggactcatggtgcaacatacaggagccaggctttagggaggggaggaaaggagcctggcggcaggggtctctgcaatggcaagaaagtgagtgaatccagcgctgccacctggttatccccttctcgttgaaaatagcagcgcaggtgcaaattcctaaacacaggctgcctgcactcggtgttacctcgggctgaggcatgataatattttattttttaaagctgtgaggaaatgaaagtgaggctttggttggggcgaggcagttgtgaaagaaattaaaataaaagaccctttgtaaatgcagacttagaagaaatactgaatttgtgtcagaagttctccagtgtttgtgttaatcgtgtggtgataatcctgtcctccttttaaagcgaattctctactgaaaggtctgctctgcttaaggagctacaaactgctctcaaaagaatgaaatactgagttccaattcagtgaggcacagtgttggactatggcacatttagttggagtcggggggaggtcaggaatatgatcagataatggattttataccttagagcaaaatctattagtctctctcagtttatcaatttaaatggctttaggcttatagggggtgtaaactttaagaatataattctcccattcaagtttacagcaaacatctagccaccttcaaaacaaagaatatacagaccatcatttagcaatactaatacatgattttccttggggatggcaggtttgagaatcctttagcaacaggacatacttcccctaaattacagtgaattatttataacgagataaagctttcaggtacaagctgaaggtggggtgtctaacaactaaaaactatcactaaatctcaaagagaaagttcttgcaaaatatgtaaagttcacaaggtgcagacattttccttctttaggcttttatctaaggaagggctatgaaactgggcccatctgtatacaggctcaaatttacgtttttaaaggaagaatctatgcagctgaggcttattgcaggaaatacttcatttgtatgtaaatattattgtaaataaataggaggctgtatatttttgaagttgttgatctgcactgaaatagaagtctctaggatctgcatataaacaataaatgtttcctagaaattagtggttttgtttgggaattagaaaaatttacattctctcccaggtaacatagttctctcaatgtaaacttggaacctgaaaccctacttaatttagagaaagaaatgtctgagaaatagttcccttgatttcttatgctggcattaagatcaattatttaacagatagtcctctgagatacaagtaaggaatatttagacacaaatccttgtcctatagaaacagatatacccaaatgacaaattgtttcttcataatgatcttccatttttaacactgataccactacacagtacatatgaaaacagaagctggggagaagaatgtttttttcacaattgaattgctgcatttctcaaactttgggatctatgaaagcggggagagggaacctgaatattaattatgagcacaaatttgaaggaaagaaaacaaagaaccattatctaatcaagctttgaaagtcctgcatgtttgccttttattttagtgttgacgccaacatagactgtctaaggtatttttttccccaaacacttgaatcttggtcgttggtatgtaatccactctctagagtccagtgtactttagacttcatctgagtccaatacatgtaccacactactgttttattaatgtaaaaaccttgtaaatgaatttcagatgggtgatttaagtgagtcacaagtcacaaaactttgctattcatagttaatcaaatagaactgggttttttttttcagagtgtggtgtaaataaagaaatataagaagttctgttctataactgctctgttaacatagtttttaaacattaaaaaatgtgaactaaaagtatttaaaaa

SEQ ID NO: 338 - protein, 487 aa, Homo Sapiens
MMHFKSGLELTELQNMTVPEDDNISNDSNDFTEVENGQINSKFISDRESRRSLTNSHLEKKKCDEYIPGTTSLGMSVFNLSNAIMGSGILGLAFALANTGILLFLVLLTSVTLLSIYSINLLLICSKETGCMVYEKLGEQVFGTTGKFVIFGATSLQNTGAMLSYLFIVKNELPSAIKFLMGKEETFSAWYVDGRVLVVIVTFGIILPLCLLKNLGYLGYTSGFSLSCMVFFLIVVIYKKFQIPCIVPELNSTISANSTNADTCTPKYVTFNSKTVYALPTIAFAFVCHPSVLPIYSELKDRSQKKMQMVSNISFFAMFVMYFLTAIFGYLTFYDNVQSDLLHKYQSKDDILILTVRLAVIVAVILTVPVLFFTVRSSLFELAKKTKFNLCRHTVVTCILLVVINLLVIFIPSMKDIFGVVGVTSANMLIFILPSSLYLKITDQDGDKGTQRIWAALFLGLGVLFSLVSIPLVIYDWACSSSSDEGH

SEQ ID NO: 339 - DNA, 6330 bp, Homo Sapiens
tgacgcccccgaacccagctgcagaagctgccgccacctccaatgcacaaggtgtctcatctgaaaagaaacctgagccccagggaggcggcgcggagcgaccctggcagagctggcgcaaacagggcgagaggtcgctgggcagcgttcgaggaccagagggagctcggccacagaagaccccagtgatctgatcccgggatcccggctccaagctctcctcgcattttacagatttcacccccgcgactatctccccaaaacggagcctttatatcaagagaaggtgcgggagctggggcaaccaggactttctcgggcacccaagatgcgctccattaggaagaggtggacgatctgcacaataagtctgctcctgatcttttataagacaaaagaaatagcaagaactgaggagcaccaggagacgcaactcatcggagatggtgaattgtctttgagtcggtcacttgtcaatagctctgataaaatcattcgaaaggctggctcttcaatcttccagcacaatgtagaaggttggaaaatcaattcctctttggtcctagagataaggaagaacatacttcgtttcttagatgcagaacgagatgtgtcagtggtcaagagcagttttaagcctggtgatgtcatacactatgtgcttgacaggcgccggacactaaacatttctcatgatctacatagcctcctacctgaagtttcaccaatgaagaatcgcaggtttaagacctgtgcagttgttggaaattctggcattctgttagacagtgaatgtggaaaggagattgacagtcacaattttgtaataaggtgtaatctagctcctgtggtggagtttgctgcagatgtgggaactaaatcagattttattaccatgaatccatcagttgtacaaagagcatttggaggctttcgaaatgagagtgacagagaaaaatttgtgcatagactttccatgctgaatgacagtgtcctttggattcctgctttcatggtcaaaggaggagagaagcacgtggagtgggttaatgcattaatccttaagaataaactgaaagtgcgaactgcctatccgtcattgagacttattcatgctgtcagaggttactggctgaccaacaaagttcctatcaaaagacccagcacaggtcttctcatgtatacacttgccacaagattctgtgatgaaattcacctgtatggattctggcccttccctaaggatttaaatggaaaagcggtcaaatatcattattatgatgacttaaaatataggtacttttccaatgcaagccctcacagaatgccattagaattcaaaacattaaatgtgctacataatagaggagctctaaaactgacaacaggaaagtgtgtaaagcaataaagcacattttgaaacaaacaatatgcacttcttttctgaagatgcttccgaagatttgaaaataggatccaaaacacggctgggtttcagcatccaccaatgaactgaaaggtgaataaaggacgttcatgagaaatcgactaccagctgatgaaatacctgcaaagtgctctaaaaattaaatattttgactttaagggtcctagtaagtgccacttccactaagaatacagtttgaatgtataatcagtagtgtttacaagatccaacagtgcactcatcattagttaacaaagcaaatatgttcatcactgtcaggctgcccacagcaacaccaagcatattagaagaggaaccccaggaacgcaactcagaccttgggaaattaaaccatccttgtcagcagaagccaagatggaagcagtttgagcaatgaaatccgtaagattaaacaactcaagtaaatgcttcagtcaggactctgagtctgatcatgaattttatgttttaatttatgttttttttttgtcttctggaatctcttttggtttggatattgggatgcttagaaatcctttctgagatgcatatgagtgaggaaataaactttaagtaattatttttaaagttcttatactttttaaaagctatcacacaaagacttttttttttttttttgtctcgctctgttgcccaggctggagtacagtggcgcgatctcagctcactgcaagctccgcctcccaagttcactccattctcctgcctcagcctccggagtagctgggactgcaggcgcctgccaccacgcctggctaattttttgtatttttagtggagacggattttcaccgtgttagccaggatggtctcaatctcctgacctcgtgatccacccgccttggcctcccaaagtgctgggattacaggcgtgagccaccgtgcctggccgacatttttaaaaaagttttattttgcacggctctaaacctccatgttattttccagtggtgtagaaggtaccagctaaagtgaaccactatgtaatattaggccattctaaaggaaagatgttccatgtcatcagagatggtaaaataggccgggaaaaaaaaatctttggtaccaaagattacacttgtgtttctacacagcaaaccatttttctttcatgaaaataatatattattaacatgaatatattattttgctattaatgtgaaagttgtctctaaatattttttaattttcaaactcatactttattttcatttgaaatgtttttcacaccttttgcattacataataattttgtggaagcattttgccctttagaataaatattagattgatatagctgaaatgtgacttccagttctttgatattccccttgttattcaaatagaaatatggaaatgctttatatattactgttaaatttcttagtgcagaaataacattattaatagagtattgttttcaaaacagagatgattaatttcaagaggtttaacagtgaaattgtgtcaatattttgcatttaaaatgaatttaattgaccgatattttctgtagttaaatttagtcacaatatcacatatgttcttcaagaaacacatgaaattattaataaagtaattaaaaaatttttaatgtataacagaattgaccaataggccagttttctggtaacttatgatagtagattgtttctttagaaactgggcagaagctctgcattctcacttgtactttgatttcttatttcttgggcaggcaatttgaggaaagaagaaatggcatggggaatatatatgttttgtttcttagggaaaacagtctgagaaatgaataaaaagcatgaagtacgtgtgtgtgtgtgtgtgttaccatggaaaaggatattcacagtagtacagttctcaatatttttaattagatgtcatatttttttaatatagtaaaaccttgggatatagaatattacatcttttgagaatgtatgtgtctctaagtaagtaaaatctaatgcgtataggagactgatagctaaaaatgaatggaacattaatgtacttttataattaaacctcttatctatcagaaattgtaagagaatagatacatgttttgaatgtaaagttgaaaagtctggtttacttaataaattgaaagtgatttataaaatctaaatttggactacttgcaaatgataagctattctagtagcctttagtttaaatccaacagaaatctagaagtcacaagcaaatatcttaaaggtaaaatccatctgggcactcatttaaagtatatcttaaaaaagcagcagcaaggtaccttgccatttttagcatattttcttcctttttcttttttcttttttttttttttttgagatggagtctcactctgtcacacaggctggaatgcagtgatgccatctcagctcactgcaacctccacctcctgggttcaagtgattctcgtgcctcagcctcccaagtagctggggttacaggcgcccaccaccacactcggctaattttgtgtttttagtagagacaaagtttcaccatgttggccaggctggtcttgaacttcctgacctcaggttatccacccacctcagcctcccaaagtgctgggattacaggtgtgagccaccgcagccggaccatttttagtatattttcagtaaatacatttaaacaatgttaaggccacagcacacatatctcagccattcattgttctgtgcattgatgtttatctcatagatgcattgagtagtgcctttttagctttttcacattactttgtcaccatatcctttgtgttctctaaatacattgcccacttccaaaaatgttcagcatgaaaaaaagggcttcagtgtcgattgagattgcttttgttcatctcagggatttcaatagtcaagaatgaattcagttaaaggtatttagggttcaaagaagacaaactgtacaagcccatttcattccttgttgtatacctttccatctgccctcccattttaactatctactgtggcctttttatggaaacagagcaagatcaatgaaggctaatggcaagaataagaaaaagagttgagatttaaccaatagcggagcataaaggatcatgacaaaatcaaattataaaagcatacttgaaataggtggagctttttcttttgaaaatatatattcacaattttaatattttaatttattttttactatttaaccctgtacttggcaatgctcaggcagctgattgtgaaatattcttgtcctttacagaacatggttgttattgtgctgttgacatgaatagaccatggaaacattttcatcattattattcagcctgtgctgtagttaatgttaagttgctgaaataaaaagtgagcaagtaatagattttcttggcaaatctaatgattcagcccacaggactgttgaaactactgcggaagtttttctatctgaaagaaggtgctgggcattcaaatgtgttcatgtattgtatatcatatgaattgtatatcaattactaatgggaatttctacatatatgcttacaaaagcaatttatttaagtaatgctaggggtagtgtacataccaattagttattcagctactatacagaaaaaggatgaacaaattaatttatttctaattgagccagttagacataatgcatataacgtgatatttggttcatgaaagagttgttttcatgtggttattgtagggagtatatataattgtggaaggggtatgggaagagttgtgtatagttagttgttatctctacaagtttgaaagttttcccatcaaacattatcaatataccaatgttttaaaaattgagtgagggttattatttgtatttgatgaaagaaaatccaaataaagcccacctagaaatagatattttattatatatgtgctatagatatacctatatagtacaaatagacatgtgtgatgcatatatacaatgttatatatgtgtatatgtctgtatacacactgagtctgtaatatgtatacactaaatttgtgttatgctaacatcttcagggtctgcactgtgaactcccctggagataagtaagtccactttagaataaagaagttcttttgagacttcagttactaacgtgctttaagaggtatctactttataactgaattctatgtcgttcatacgtagagttacagtaagggtctagtatgtccaaatcttaataataaagaagaaaagtaaaggcttcaagctagcaatgtattcgaattacagttttcagattgtggctccaggccttgtgtttctcatttaagtagcaccttttaataaaaaccgtttctttgtgtaggcaaaagcacaagtgtttcaaatgtaaatagcaggaaaaaaaaagagtttacagagatagcattgctgcacagaataattgctactgagtatttcttatagaatttgtggaactgaaagatgaggtttattctgtcaagttcaagttcattctgttcaacactgttttcttattgtttgtgtatagcaaccgggtattattgttttatcatttgtaaaattgtaaaataaattaatccctttttttcactgtttctcttatctcatatatccaagcccttggttatactttgtatgtcaatgttaggtgatcatttttaacaagctttggcttgtgctttgcttttccactccccttagccctagtggttggcaattaggcaaaccatttatttttaagtgtatacatgggaatatgaacaatgtcaaaaaccccatgaatattaggaaatccttaacgatattttgtgtagcacattctgtttgcggttgagggaataaagtatttcacaagtgaaaaaaaaaaa

SEQ ID NO: 340 - protein, 359 aa, Homo Sapiens
MRSIRKRWTICTISLLLIFYKTKEIARTEEHQETQLIGDGELSLSRSLVNSSDKIIRKAGSSIFQHNVEGWKINSSLVLEIRKNILRFLDAERDVSVVKSSFKPGDVIHYVLDRRRTLNISHDLHSLLPEVSPMKNRRFKTCAVVGNSGILLDSECGKEIDSHNFVIRCNLAPVVEFAADVGTKSDFITMNPSVVQRAFGGFRNESDREKFVHRLSMLNDSVLWIPAFMVKGGEKHVEWVNALILKNKLKVRTAYPSLRLIHAVRGYWLTNKVPIKRPSTGLLMYTLATRFCDEIHLYGFWPFPKDLNGKAVKYHYYDDLKYRYFSNASPHRMPLEFKTLNVLHNRGALKLTTGKCVKQ

SEQ ID NO: 341 - DNA, 7529 bp, Homo Sapiens
gcctctggggcagaccctggagatcgggctcgcggcgccttccatcgtggctccgcgctggggcttgcggagcacgcttcccgcccctcggagcccgcgggcccggccgccccgcccccgggcgccctgagcgagcaggcggggagggcggggagggtccgcgcgttggtggtgctcgcctcgcagctgcgcccgccggcttcagcaccttccgctgtccgccgctgcagccgcctcctcctccaggtgctgactattctgatgccgagtttccaattgccttgattaaagtagaaacattctatggcttggatgacttacatttcaaattggtttgagcaagatgattggtatgaaggactacaaagagcaaacatgtcccaggtaaggcaagtgggattgctggctgctggatgtcagccatggaacaaggatgtatgtgctgccagtggagacaggtttgcatattgtgcgaccctggctatctatatttatcagttggatcaccgttataatgaattcaaacttcacgcaattatgtctgaacataaaaaaacaatcacagcaatttcttggtgtccacataatcctgatctgtttgcaagtggcagtactgataatttagtgatcatttggaatgttgcagaacaaaaagtcattgctaaactcgacagtacaaaagggatccctgcttctcttagttggtgctggaatgcagaggatgtggtggcatttgtttcccacagaggcccactgttcatttggaccatctcaggaccagatagtggagtgattgtacacaaagatgctcatagcttcttgtctgatatctgtatgttcagatggcatacacaccaaaaggggaaagttgtgtttggtcatattgatggaagtctatcaatttttcatccaggtaataaaaatcagaaacatgttttgagaccagaatctcttgaagggacagatgaagaggatccagttacggccttggaatgggacccactatctactgattatcttctagtggttaatttgcattatggaattcgcctggtagattctgaatcactttcttgcataacaacatttaatcttcccagtgcagcagcttctgtacagtgcttagcctgggttcccagtgctcctgggatgtttataactggagattctcaagtgggtgttttacgcatttggaatgtttcaagaacaacacctattgataatcttaaattaaagaaaacaggatttcactgcttacatgtacttaattctcctccaagaaaaaagttttcagtccaatctccaaccaaaaatcattatacatcctcaacaagcgaagcagttccacccccaactttaacacagaatcaagcattttctcttcctcctggtcatgcagtgtgttgtttcttggatggtggagttggactttatgatatgggagctaagaagtgggattttcttagagacttgggacatgtggaaactatctttgactgcaaattcaaacctgacgatcctaatcttttagcaacagcttcatttgatggcactataaaagtctgggatataaacacattaacagcagtgtacacatccccgggtaatgaaggtgttatttattccctttcttgggctccaggtggtttaaattgtattgctgggggaacttcccgaaatggtgcttttatttggaatgttcaaaagggcaaaattatacaacgatttaatgagcatggaacaaatggaatattctgcattgcctggagtcataaagattctaaaagaatagcaacctgcagcagtgatggtttctgtattattcgaacaattgatggtaaagtgctacacaaatataaacatccagctgcagtgtttggttgtgattggagccaaaacaataaagacatgatagccactggctgtgaagacacaaatgttcgtgtttattatgtagccaccagctcagatcaaccattgaaagtatttagtgggcatacagcaaaagtgtttcatgttaaatggtctcctctgagagagggaattctttgcagtggttctgatgatggtaccgttcgaatctgggattatactcaggatgcttgcatcaatattcttaatggacacactgcacctgtgagaggattaatgtggaatactgagattccatatctgctcatatctggcagctgggactatactataaaagtatgggacactcgagaaggaacttgtgtggatactgtgtatgatcacggtgcagatgtatatggtttaacctgccatcccagtcgccccttcactatggcctcttgctcccgtgactctacagtgagactctggtcattaacagccttagtcactcctgtacaaataaatattctggcagacagatcttgggaagaaattattgggaacactgattatgctatagaaccaggcactcctcctctactgtgtggtaaagtgtcaagagatattagacaggaaatagaaaaactaactgctaattctcaagtgaaaaaactaagatggttctcagaatgtttatctcctccaggtggcagtgacaatttatggaacttggttgctgtgataaaaggacaggatgatagcttacttcctcagaactactgcaaaggaataatgcacttgaaacatctgattaaatttagaacatctgaagctcaagaactaacaacagtcaagatgtctaaatttggtggtggtattggtgtacctgctaaagaggaaagactgaaggaagctgctgaaatccacttgagattaggacaaattcagagatactgtgaacttatggttgaacttggagagtgggacaaagccctgtcaattgcaccaggagtctctgtgaaatactggaagaagttaatgcagaggagagctgaccaattaatccaggaagataaggatgatgtcattccatactgcatagccattggtgatgtgaaaaagctagtccattttttcatgtcaagaggtcagcttaaagaagctctgcttgttgcacaggctgcttgtgaaggaaatatgcagcccttacatgtttccgtgcctaaaggagcttcatattctgatgatatctacaaggaagactttaatgaactcctgcacaaagtcagtaaagaactggcagaatggtattttcaagatggtcgagcagtactagccgcatgttgccatcttgccatagataatattgagcttgctatggcatacctgattcgcggaaatgaactggagttggcagtctgtgtgggcacagtactaggagagtctgcagcaccagcaacccactatgccttagaattactggcgagaaagtgcatgatgatttcagtatgctttccatgtgttggatacagtgtccccttttgttacgttaacaggaatttggcagctgatcttcttctgatgattcctgataatgaactacatttaataaaactctgtgctttctacccaggatgtactgaagagataaatgaccttcatgataagtgtaagctacccacagtggaagaatgtatgcagttagctgagacagcccgtgcagatgacaatatatttgaaactgtaaaatattacttgttaagtcaagaacctgaaaaagcccttcctattggtattagctttgttaaagaatacatcagtagctcagactggactttggataccatataccctgttcttgacctactgagctatattcgtactgaaaaattactcttgcatacgtgtactgaagctcgaaatgagttgctgatattatgtggttacattggtgcattactggctatcagaagacagtaccaaagcattgttccagcactttatgagtacacaagtcagctattaaaacgtcgggaggtgtcagtacctttaaaaattgaatatctttctgaggaattggatgcatggagagcttgcacacagtccaccaacagatcattagaagactctccgtatacacccccttctgattcacaaagaatgatttatgcaactttattaaagagactaaaagaagagtcactgaaaggaattattggaccagattatgtgactggatcaaatcttccaagtcattctgatattcacatttcttgtcttacgggattaaaaatccagggccctgtgtttttccttgaagacgggaaatctgctatctccttgaatgatgctttgatgtgggcaaaggtgaatccattctcacctttagggactggaatacgactcaatccattctgatagaagatttttgtccatgcttgatttttttttttaaagaaaaactttcatgggttagcattaccttaatctttgttgctcaagtgccagaggttgggagaaggattgcaggttgggagaggtgggaaatagcagtgaattttagtcattaacttcaaaatatatatatatatataatttaaaggaaaaataggtgcctcctttataaacagtaatagctacgtttgggaaggaggaaacatttaaattataaaggactgaataatctaaaaagcatataaaagtttcacacagcataaaagataccaaaatatcatatggttgaaatattgaaacatattaaattgtgcaacacctagaatagtgctagacatacagtaagtacttaatggatatttgaatgattgaatatcttgaaatgttgaaatgtaaggtgtgcacagtgatcttcaacttaacaaacacttacgttctcctttataaaatgcatagtaaaccactaacgttagctgttttaataaaagttttcagttataagtttagtaaatattaataaatggatacacattcaaaatacttttaaaaaaaagaaaatgttaccagtttttttatctgaagtttaactgtcccattgtaaaggtgtaagttatataggcttgaaaaaaattggcgggtaaaaatcacaaaatgcagtcgaatatatatatgaaaacttgcattaggtgataaagtgactattttaagagattcagcatgcatggatattagttttgattaatgtgtacaataatttacacagtatactctagtcaatttatgttaactttatttaaaacacaatttatttggccgggcacggtggctcacacctgtaatctcagcactttggcaggccaaggcaggtggatcacctgaggtcaggagttcatgaccagcctggccagcatggtaaaaccctgtctccactaaaaatacaaaaattagccaggcatggtggcgggcacctgtaatcccagttacttgggaagctgaggcaggagaatcccttgaacctgggaggcagaggttccagtgagccaagatcgcaccactgcactccagcctgggcaacaaagagcgaaactctgtctcaaaaaacaaaccaacaaaaaccacaattgatttgatgaaaattagttttaagtaaatgtttgtaaatagatattggttgaatttttggatatattatgttgatttaacttttaaaatgttgtttaaaagtgtgaagctatgaaaagcctgataatgtgactacagatatttcagttggactagaattctgactttgaaacttattaaattaatgcatactggaagtactttgatactcaagttgtttcacaagatttataatatagatggttttgtttgactaaagaataatctcatataactagaatacttgtggcttttattatctttaaacttgttgcatttaaaatatttttaaaaccttcttaacaaaacttcttaaaactggaaaaaatatatattatgtatctatgtatcatatttatcacatgaccacttttgattccttaaaaagacattacaggcttaaattccattttattaaaaaaaaaaaattgcctgtaatcccagcacttcaggaggccgagatgggcagatcttgaggtcggtagatggagaccatcctggccaacatggtgaaaccctgtctctactaaaaatacaaaaattagctgggtgtggtggtgtgtacctgtagtcccagctacccaggaagctaaggcaggagaatcgcttgaatccaggaggcggaggttgcagtgagctgagatcgcactactgcactccagcctgggcgacagagcaagaccaccatctccaaaaattatatatataaaaataattaatattatagaagagaatatacacaactcagagatgcaatggataatataaaaagagtacctgagatgtatttttttaaactcttagagatatctgtaactcaaatttttcttaggtgaggaggattattaactggcacatatgtactaaaaacccctcacttaaaaatggcagtctcaatcctactgtcattctttttattttaaaataaataaataagcctatctttttgtgcttacatacttaaaaggatatcattaagtatataaacaatcattacttctgtatttttaatgaatgcaggaaaataatatttttatgtataaaagatgaagaaaaaattttgcaagtctttaagcacataaatacaacagaatagccacccaatttctgtctgaaatctaaattggatggatttgaccatcattctattatctttgatttctacaatgtctatatcttattacctataactattaatttttcatagaattataaatgtcatttgactatgtcaatctgtatatattgtaccttaatatgaaaaacaaattttttaattcataaaagtatttttattagatttcatatgcatgaaacccaagcaaattatatgaatttattttactatttgaaaatgttcatattaccaataatgtggacaaattactttgcaggtttaaatatgcctctgtaaaggaagagtctcattagacaatgatttttaaagcattggaaaaatattttgcctgtaaaagttagtaactaggtggttcacaaaattacaacatcaaaatagttacatcttgtgaaaatatatgatttttatgtcaatcaagacaaatgaaatatatatgtatgtgtatatatatacatgtatgtatgaaatatatatatgtgcgtgtgtgtgtgtatatatatatatatatatatatatttctatgaaattgtccagatgtgttcaggaacatgattgcattagagcaatgactgtattttgttgtccttataacatttatattatttcagttttaagtcaaaaggtattctgaatataataaaagcctcacaaattatttgtaaaatttagtagttcatatttagtatatcagtaatatagaagacatctttatagtcaactcttaattaatgcttattgtaccaaatctttgagatatttgtacataaatgaaatatgtactttcatgctaaaattatatatcatgactgtgctataatttggcatgtcattatctagatttatatgtatgtacgtatttcaggtccttgaaattttaataaatattacagttaaatcctgatatgacatagttaaaaaaaaa

SEQ ID NO: 342 - protein, 1322 aa, Homo Sapiens
MAWMTYISNWFEQDDWYEGLQRANMSQVRQVGLLAAGCQPWNKDVCAASGDRFAYCATLAIYIYQLDHRYNEFKLHAIMSEHKKTITAISWCPHNPDLFASGSTDNLVIIWNVAEQKVIAKLDSTKGIPASLSWCWNAEDVVAFVSHRGPLFIWTISGPDSGVIVHKDAHSFLSDICMFRWHTHQKGKVVFGHIDGSLSIFHPGNKNQKHVLRPESLEGTDEEDPVTALEWDPLSTDYLLVVNLHYGIRLVDSESLSCITTFNLPSAAASVQCLAWVPSAPGMFITGDSQVGVLRIWNVSRTTPIDNLKLKKTGFHCLHVLNSPPRKKFSVQSPTKNHYTSSTSEAVPPPTLTQNQAFSLPPGHAVCCFLDGGVGLYDMGAKKWDFLRDLGHVETIFDCKFKPDDPNLLATASFDGTIKVWDINTLTAVYTSPGNEGVIYSLSWAPGGLNCIAGGTSRNGAFIWNVQKGKIIQRFNEHGTNGIFCIAWSHKDSKRIATCSSDGFCIIRTIDGKVLHKYKHPAAVFGCDWSQNNKDMIATGCEDTNVRVYYVATSSDQPLKVFSGHTAKVFHVKWSPLREGILCSGSDDGTVRIWDYTQDACINILNGHTAPVRGLMWNTEIPYLLISGSWDYTIKVWDTREGTCVDTVYDHGADVYGLTCHPSRPFTMASCSRDSTVRLWSLTALVTPVQINILADRSWEEIIGNTDYAIEPGTPPLLCGKVSRDIRQEIEKLTANSQVKKLRWFSECLSPPGGSDNLWNLVAVIKGQDDSLLPQNYCKGIMHLKHLIKFRTSEAQELTTVKMSKFGGGIGVPAKEERLKEAAEIHLRLGQIQRYCELMVELGEWDKALSIAPGVSVKYWKKLMQRRADQLIQEDKDDVIPYCIAIGDVKKLVHFFMSRGQLKEALLVAQAACEGNMQPLHVSVPKGASYSDDIYKEDFNELLHKVSKELAEWYFQDGRAVLAACCHLAIDNIELAMAYLIRGNELELAVCVGTVLGESAAPATHYALELLARKCMMISVCFPCVGYSVPFCYVNRNLAADLLLMIPDNELHLIKLCAFYPGCTEEINDLHDKCKLPTVEECMQLAETARADDNIFETVKYYLLSQEPEKALPIGISFVKEYISSSDWTLDTIYPVLDLLSYIRTEKLLLHTCTEARNELLILCGYIGALLAIRRQYQSIVPALYEYTSQLLKRREVSVPLKIEYLSEELDAWRACTQSTNRSLEDSPYTPPSDSQRMIYATLLKRLKEESLKGIIGPDYVTGSNLPSHSDIHISCLTGLKIQGPVFFLEDGKSAISLNDALMWAKVNPFSPLGTGIRLNPF

SEQ ID NO: 343 - DNA, 4809 bp, Homo Sapiens
gtgaactgttgcaccgtgcaattgcacactataaatgtctttccttatctgtgtgtactcttatctcactgttctattttttctcctcatttatattaactctttcttacctttttttctgaacttctaggccttctctttccagaactggtggaagacaaatgaaacggccaagatggtaagaaacaagccgcatttctccttggggagactgataatttaaaaggtttgttgtgtcagaaacattcccagcttcatcaccaaccctttccttccacctctgcccactggagaccacttatatcccgaagcggacgcggcagctgaagtcaggaaaccatgcatcacattagcaggagccaactgcagactttaaactccgttcaacatgtggatgcggcagagaaatgacctgtccagacaagccggggcagctcataaactggttcatctgctccctgtgcgtcccgcgggtgcgtaagctctggagcagccggcgtccaaggacccggagaaaccttctgctgggcactgcgtgtgccatctacttgggcttcctggtgagccaggtggggagggcctctctccagcatggacaggcggctgagaaggggccacatcgcagccgcgacaccgccgagccatccttccctgagatacccctggatggtaccctggcccctccagagtcccagggcaatgggtccactctgcagcccaatgtggtgtacattaccctacgctccaagcgcagcaagccggccaatatccgtggcaccgtgaagcccaagcgcaggaaaaagcatgcagtggcatcggctgccccagggcaggaggctttggtcggaccatcccttcagccgcaggaagcggcaagggaagctgatgctgtagcacctgggtacgctcagggagcaaacctggttaagattggagagcgaccctggaggttggtgcggggtccgggagtgcgagccgggggcccagacttcctgcagcccagctccagggagagcaacattaggatctacagcgagagcgccccctcctggctgagcaaagatgacatccgaagaatgcgactcttggcggacagcgcagtggcagggctccggcctgtgtcctctaggagcggagcccgtttgctggtgctggaggggggcgcacctggcgctgtgctccgctgtggccctagcccctgtgggcttctcaagcagcccttggacatgagtgaggtgtttgccttccacctagacaggatcctggggctcaacaggaccctgccgtctgtgagcaggaaagcagagttcatccaagatggccgcccatgccccatcattctttgggatgcatctttatcttcagcaagtaatgacacccattcttctgttaagctcacctggggaacttatcagcagttgctgaaacagaaatgctggcagaatggccgagtacccaagcctgaatcgggttgtactgaaatacatcatcatgagtggtccaagatggcactctttgattttttgttacagatttataatcgcttagatacaaattgctgtggattcagacctcgcaaggaagatgcctgtgtacagaatggattgaggccaaaatgtgatgaccaaggttctgcggctctagcacacattatccagcgaaagcatgacccaaggcatttggtttttatagacaacaagggtttctttgacaggagtgaagataacttaaacttcaaattgttagaaggcatcaaagagtttccagcttctgcagtttctgttttgaagagccagcacttacggcagaaacttcttcagtctctgtttcttgataaagtgtattgggaaagtcaaggaggtagacaaggaattgaaaagcttatcgatgtaatagaacacagagccaaaattcttatcacctatatcaatgcacacggggtcaaagtattacctatgaatgaatgacaaaagaatcttctggctagggtgttagatatatttatgcatttttggttttgtttttaaatcaagcacatcaacctcaagcccgtttagcaatgaggcagtgtagatgaatacgtaaaataaatgactttaaccaagtagctataatgggacttagcactgtatgcatacttaaaaaggttttgaaaaacaaactacttgagaaatatttgtttatatttttctctaacatcatgctatgtgtcagtctgaacatctgacaacagaaatttcagttattattctagctaagttttgaaaacatttgtcatgctgtttaatagaaaactgcaaaccagagacactgactccattaataaaccatattttgtgccgttttgactgttctgaccaaatactaatgggaacaattcttgacgtttttctgttgctgattgttaacatagagcagtctctacactaccctgaggcaactctacattggaacactgaggcttacagcctgcaagagcatcagagctgaccatacatttaaacagaaatgctggtttatttgcaaaatcaccagtatattttctattgtgtctataaaaaatcagtcatttaagtacaagaatcatattttccattcctttttagaaatttattttgttgtccctatggaaatcattcacatctgacaatttatatgttaaagagttttactctctctattttggtccaatttgtatctagtggctgagaaattaaataattctaaagtatgaagttacctatctgaaaatgtacttacagagtatcattttaaaatggatgtctctttaaaaattttgttacttttaccaacaatgtaatataatttatgtatattttattaataatagtgaattccttaaaatttgttctatgtacttatatttaatttgatttaatggttactgcccagatattgagaattggttcaaatattgagtgtgtttcaatatattatctggcttatttcaacatgagtaatatgagcaaaataagttaaaacctgcgtctgatcaattttcctcatgactagaactaaaacagtaaatttggacaatattaagcctcaaataatcatctccaaactccttctaacactttttaaatcagattggaagacatggacaaatcaggttcatgtgttgcatctttatgtcctttgccaatatccaagatcatcacatatggtagatattcacatggagtttcaaattcagaatagattaccattaccttcctgcccttacacatcctactccttatttaaaagttctatttgtgacttttcatttcctgaaagtttaaaaatacaatttgagaatgtttataatacattctctcctgtcttttcacggttacgtctgttattgctgaaatacaccacattttctttgttctggtcaaggttaactcaatatctgtgtgaaagagaactactaacaacgttacaatagaggctagatttgaaaaaaaaaatctatagatctaattgatacaattgtagaacaaaatgtcaaaataatgttttaagtataagagaagatggaccaaggagagagagatcatttgaaaatctaattgtagcttttctaggctcacattcatgtactacttttagcacccttatgggctgtgctcgccccctggacagttgagctttggattatcttcctcttcaattttccctctattgacccgagtgtctccctctgcttctacagatttatagtactccttggctcttttgagtctccacttttactcactgtctctgggatttttaagatccttttcttctcttataaatcatcctcttaatgaaaattagcctaacaaaagtttggagactggaatcctactttgagccactgacttgaaataactcttttggcaagttgcctgacatcctgtcttaccaaggtggcatatttgcatttttactgcttaaaacatttttttttttttaccatctttatccaaatttatcatattgatggtaggactaacaggctttttagaagctggctttaactttgagtctcaagctacaatgctgttgggcagcctggtcttcccacgtgagggtttaactttgtttatttgcctccagttattccaaaatgcttattaaatgaaagtcccaggaacatgtttattttagtcacctttgctttttaacaattttgttttgtaatcaatgagtaattcatgatgaattatttttgactaatggatagccgaaggccaggcttttaattctaataggtaatgttcttcttttgtcttattgaaacaatgagaatactctgtgcatttcaaatgcactccgattatgctgtggttttattcacataagcacaatatgtgttttatttataacttcataacaaacttataatataataatttaccttagcagacatgcaaaagcttattcttgtgtgacttactttctttaagctaataatataaaaataaatatgtatcttaaaaatctataataaaacattagaaattaaagatatgtgctttttattttgcagatgagttcatttgcttttgtagatgtgttttcagagctaggtacagaggaatgtttgctacctttagcggtgaaaaaagaaagagagtcaagaattttgttggattgtgtttgtgtgtgcatatatttgatatcatcattatatttgtaatctttggacttgtaatcatagcctgtttattctactgtgccattaaatatactttaccttatacataacgaataaaatacctagaagtagatttatttacaaaaaaaaaaaaaaaa

SEQ ID NO: 344 - protein, 519 aa, Homo Sapiens
MTCPDKPGQLINWFICSLCVPRVRKLWSSRRPRTRRNLLLGTACAIYLGFLVSQVGRASLQHGQAAEKGPHRSRDTAEPSFPEIPLDGTLAPPESQGNGSTLQPNVVYITLRSKRSKPANIRGTVKPKRRKKHAVASAAPGQEALVGPSLQPQEAAREADAVAPGYAQGANLVKIGERPWRLVRGPGVRAGGPDFLQPSSRESNIRIYSESAPSWLSKDDIRRMRLLADSAVAGLRPVSSRSGARLLVLEGGAPGAVLRCGPSPCGLLKQPLDMSEVFAFHLDRILGLNRTLPSVSRKAEFIQDGRPCPIILWDASLSSASNDTHSSVKLTWGTYQQLLKQKCWQNGRVPKPESGCTEIHHHEWSKMALFDFLLQIYNRLDTNCCGFRPRKEDACVQNGLRPKCDDQGSAALAHIIQRKHDPRHLVFIDNKGFFDRSEDNLNFKLLEGIKEFPASAVSVLKSQHLRQKLLQSLFLDKVYWESQGGRQGIEKLIDVIEHRAKILITYINAHGVKVLPMNE

SEQ ID NO: 345 - DNA, 1815 bp, Homo Sapiens
cttagctgaagatgactgacagtgttatttattccatgttagagttgcctacggcaacccaagcccagaatgactatggaccacagcaaaaatcttcctcttccaggccttcttgttcttgccttgtggcaatagctttggggcttctgactgcagttcttctgagtgtgctgctataccagtggatcctgtgccagggctccaactactccacttgtgccagctgtcctagctgcccagaccgctggatgaaatatggtaaccattgttattatttctcagtggaggaaaaggactggaattctagtctggaattctgcctagccagagactcacacctccttgtgataacggacaatcaggaaatgagcctgctccaagttttcctcagtgaggccttttgctggattggtctgaggaacaattctggctggaggtgggaagatggatcacctctaaacttctcaaggatttcttctaatagctttgtgcagacatgcggtgccatcaacaaaaatggtcttcaagcctcaagctgtgaagttcctttacactgggtgtgtaagaaggtcagactttgatagatgaccactctgtcctgaccctcagatctgtcatgtatccctaaaaggagggagctggccactggctgttgggaaagccatgagtatatagttagcaaatactgaactttctcagatatggcattagatgcaagacaacctcctagggattgatgcctaactgatggattctctttgagactatttagatattatgtgagcaatttaaagaccagatctaagcaaattttgaaatagatgtttgttttttgtatttctcagtatggaaactaatgctgccactctcatccccgtcccaaccatctctgtcaaaaatatacctttttcatatgatattctgagctaatctgataaaatctatgccaatatatactattgcttgtgtactagagaagtacattattgctgtactcctctgtacattactgatccctgatggtatatttctatcctaacagtgtccctttgcagatcaagctttattctgaagaataaacctagctggcatgctggtgtgtacctgtagtcctagctatttgggaagctgaggtgggagggtcgcttgagcccaggagtttgaggctgcagtgagctatgattgtgccactgtactccagcctgggagatagagcaagactccatctctaaaaaaaaaaaaaaatgctaatgtgagaatataaattgtgggaaatgagtgagggcaaggtggtacttcctccttctgagctcttcacacgtaatgcaaaaacccggtcttaactgattttgttttttttctgagtatgcatatatgtggttgaatgaaccaatgtgtgattgtatcttttccattatgtgactgtttgacctgcatattaatttcaagatagcagtcaattcgataaggcattttcatagaggaaagtttacagaaacagtttatgtggttggatcaccaaattatcttaggtactaaggcctcaaaaataagaaaaactttattatttctcctcagtagagtttggacatacataaggagagaaggtacagtgatgaaggagaccataattctgtagtgttgatgatcctggattataatctttttctctttatctttcatagtttttttaaaaacatggactgtatcttatctaccactatatcccaaatacctaagatagtgcttacgttcagtgactattaaataaataaatggatgaattaaaaaaaaaaaaaaaaaaaaaaaaaaaaa

SEQ ID NO: 346 - protein, 189 aa, Homo Sapiens
MTDSVIYSMLELPTATQAQNDYGPQQKSSSSRPSCSCLVAIALGLLTAVLLSVLLYQWILCQGSNYSTCASCPSCPDRWMKYGNHCYYFSVEEKDWNSSLEFCLARDSHLLVITDNQEMSLLQVFLSEAFCWIGLRNNSGWRWEDGSPLNFSRISSNSFVQTCGAINKNGLQASSCEVPLHWVCKKVRL

SEQ ID NO: 347 - DNA, 2799 bp, Homo Sapiens
attggctgcccggccccctttgttcccgggtccgggccgcaggcccgctgcggcggactgggcggcggaagttcgacggcgccgggcgagtggctgttgagcggcgccgcgggagttccgcaggtttcccgtgttcgcagcggagccggaggccagctgaacccggccgtgggatcccggataggaggaggaggggacccataggacgcgttaacatggacctggaaaacaaagtgaagaagatgggcttaggtcacgagcaaggatttggagccccttgtttaaaatgcaaagaaaaatgtgaaggattcgaactgcacttctggagaaaaatatgtcgtaactgcaagtgtggccaagaagagcatgatgtcctcttgagcaatgaagaggatcgaaaagtgggaaaactttttgaagacaccaagtataccactctgattgcaaaactaaagtcagatggaattcccatgtataaacgcaatgttatgatattgacgaatccagttgctgccaagaagaatgtctccatcaatacagttacctatgagtgggctcctcctgtccagaatcaagcattggccaggcagtacatgcagatgctacccaaggaaaagcagccagtagcaggctcagagggggcacagtaccggaagaagcagctggcaaagcagctccctgcacatgaccaggacccttcaaagtgccatgagttgtctcccagagaggtgaaggagatggagcagtttgtgaagaaatataagagcgaagctctgggagtaggagatgtcaaacttccctgtgagatggatgcccaaggccccaaacaaatgaacattcctggaggggatagaagcaccccagcagcagtgggggccatggaggacaaatctgctgagcacaaaagaactcaatattcctgctattgctgcaaactgagtatgaaagaaggtgacccagccatctatgccgaaagggctggctatgataaactgtggcacccagcttgttttgtctgcagcacctgccatgaactcctggttgacatgatttatttttggaagaatgagaagctatactgtggcagacattactgtgacagcgagaaaccccgatgtgctggctgtgacgagctgatattcagcaatgagtatacccaggcagaaaaccagaattggcacctgaaacacttctgctgctttgactgtgatagcattctagctggggagatatacgtgatggtcaatgacaagcccgtgtgcaagccctgctatgtgaagaatcacgctgtggtgtgtcaaggatgccacaatgccatcgacccagaagtgcagcgggtgacctataacaatttcagctggcatgcatccacagagtgctttctgtgctcttgctgcagcaaatgcctcattgggcagaagttcatgccagtagaagggatggttttctgttcagtggaatgtaagaagaggatgtcttaggaggagggcacccagaagtatcgagccatagctatccaaagtggtctgcatttctactgtaaaatgcaatttgaaaaaaataaaacgcaaaaaaagaaactgtaaaggaaaccaagagattttgtttaatttttttggccattttttcttcatcaattttttttcggtctcaacttttaaacttggtttaagcatttgatttgtaaaacagtaaataattgtatctttccatagcttttcaaatgtgaaatcatttttggaagcttggatctcattaaacttcatgtctctattccatttgtgccacacacttaaaagttagtgtactgaatggaaagatgagcattcctagttctacacttcttttttccccctcatgtgtaaaatgaaaagaaaactaaatttgccctaataccaaggcgctacgtttattgcctcgtcttattcactgacctttgtaatgatacacagtgaattctttttgacaaagagaaatgcagtgtagtatgcagagctgctgttttaatgcctatgcatttactctttcctgatttaggcagaggtggcattttctttattgcatttctctatttttttaatgtaccctaccttcagtattctctttgtaagttggtgacttgcatctgtggccttgaatattttattatcacatgtggcataacagtatccacactttttagttctttatttttttttttttattttgagcaattctcctgcctcagcctcccaaatagctgggattacaggtgcatgccaccacacccagctaatttttgtatttttagtagagacaggttttcaccatgttagccaggctggtctcaaactcctgacctcagatgatccgcctgccttggcctcccaaagtgctgggattacaggtgtgggagccaccatgcctgacccacacactttttacttgtatagatgatttttggcttggacataaaagccaagccacccatttgcttttaatccaaagaacatgtatagtttttgtacccagagactatgatttatattgattgcacttgcctgccatgatttagataagattttttttgcatggtttttattctttcctaatggatcctgttttataatacttccaagcctgtccatggatatatcaaatgtcttcacttgtatattttcatggctaggtatttctaatgtttattcttccctgtgtacttctacacatagctatgcactatgaaaattaaatggaatgaatgatatgtatattactcaaaataaagtttctttcactttaaaaaaaaaaaaaaaaaaa

SEQ ID NO: 348 - protein, 421 aa, Homo Sapiens
MDLENKVKKMGLGHEQGFGAPCLKCKEKCEGFELHFWRKICRNCKCGQEEHDVLLSNEEDRKVGKLFEDTKYTTLIAKLKSDGIPMYKRNVMILTNPVAAKKNVSINTVTYEWAPPVQNQALARQYMQMLPKEKQPVAGSEGAQYRKKQLAKQLPAHDQDPSKCHELSPREVKEMEQFVKKYKSEALGVGDVKLPCEMDAQGPKQMNIPGGDRSTPAAVGAMEDKSAEHKRTQYSCYCCKLSMKEGDPAIYAERAGYDKLWHPACFVCSTCHELLVDMIYFWKNEKLYCGRHYCDSEKPRCAGCDELIFSNEYTQAENQNWHLKHFCCFDCDSILAGEIYVMVNDKPVCKPCYVKNHAVVCQGCHNAIDPEVQRVTYNNFSWHASTECFLCSCCSKCLIGQKFMPVEGMVFCSVECKKRMS

SEQ ID NO: 349 - DNA, 5296 bp, Homo Sapiens
ctgctggagtaggcacccatttaaagaaaaaatgaagaagcagcaataaagaagttgtaatcgttacctagacaaacagagaactggttttgacagtgtttctagagtgctttttattattttcctgacagttgtgttccaccatgattactttctccttcagcgaataggctaaatgaatatgaaacagaaaagcgtgtatcagcaaaccaaagcacttctgtgcaagaattttcttaagaaatggaggatgaaaagagagagcttattggaatggggcctctcaatacttctaggactgtgtattgctctgttttccagttccatgagaaatgtccagtttcctggaatggctcctcagaatctgggaagggtagataaatttaatagctcttctttaatggttgtgtatacaccaatatctaatttaacccagcagataatgaataaaacagcacttgctcctcttttgaaaggaacaagtgtcattggggcaccaaataaaacacacatggacgaaatacttctggaaaatttaccatatgctatgggaatcatctttaatgaaactttctcttataagttaatatttttccagggatataacagtccactttggaaagaagatttctcagctcattgctgggatggatatggtgagttttcatgtacattgaccaaatactggaatagaggatttgtggctttacaaacagctattaatactgccattatagaaatcacaaccaatcaccctgtgatggaggagttgatgtcagttactgctataactatgaagacattacctttcataactaaaaatcttcttcacaatgagatgtttattttattcttcttgcttcatttctccccacttgtatattttatatcactcaatgtaacaaaagagagaaaaaagtctaagaatttgatgaaaatgatgggtctccaagattcagcattctggctctcctggggtctaatctatgctggcttcatctttattatttccatattcgttacaattatcataacattcacccaaattatagtcatgactggcttcatggtcatatttatactcttttttttatatggcttatctttggtagctttggtgttcctgatgagtgtgctgttaaagaaagctgtcctcaccaatttggttgtgtttctccttaccctcttttggggatgtctgggattcactgtattttatgaacaacttccttcatctctggagtggattttgaatatttgtagcccttttgcctttactactggaatgattcagattatcaaactggattataacttgaatggtgtaatttttcctgacccttcaggagactcatatacaatgatagcaactttttctatgttgcttttggatggtctcatctacttgctattggcattatactttgacaaaattttaccctatggagatgagcgccattattctcctttatttttcttgaattcatcatcttgtttccaacaccaaaggactaatgctaaggttattgagaaagaaatcgatgctgagcatccctctgatgattattttgaaccagtagctcctgaattccaaggaaaagaagccatcagaatcagaaatgttaagaaggaatataaaggaaaatctggaaaagtggaagcattgaaaggcttgctctttgacatatatgaaggtcaaatcacggcaatcctgggtcacagtggagctggcaaatcttcactgctaaatattcttaatggattgtctgttccaacagaaggatcagttaccatctataataaaaatctctctgaaatgcaagacttggaggaaatcagaaagataactggcgtctgtcctcaattcaatgttcaatttgacatactcaccgtgaaggaaaacctcagcctgtttgctaaaataaaagggattcatctaaaggaagtggaacaagaggtacaacgaatattattggaattggacatgcaaaacattcaagataaccttgctaaacatttaagtgaaggacagaaaagaaagctgacttttgggattaccattttaggagatcctcaaattttgcttttagatgaaccaactactggattggatcccttttccagagatcaagtgtggagcctcctgagagagcgtagagcagatcatgtgatccttttcagtacccagtccatggatgaggctgacatcctggctgatagaaaagtgatcatgtccaatgggagactgaagtgtgcaggttcttctatgtttttgaaaagaaggtggggtcttggatatcacctaagtttacataggaatgaaatatgtaacccagaacaaataacatccttcattactcatcacatccccgatgctaaattaaaaacagaaaacaaagaaaagcttgtatatactttgccactggaaaggacaaatacatttccagatcttttcagtgatctggataagtgttctgaccagggagtgacaggttatgacatttccatgtcaactctaaatgaagtctttatgaaactggaaggacagtcaactatcgaacaagatttcgaacaagtggagatgataagagactcagaaagcctcaatgaaatggagctggctcactcttccttctctgaaatgcagacagctgtgagtgacatgggcctctggagaatgcaagtctttgccatggcacggctccgtttcttaaagttaaaacgtcaaactaaagtgttattgaccctattattggtatttggaatcgcaatattccctttgattgttgaaaatataatgtatgctatgttaaatgaaaagatcgattgggaatttaaaaacgaattgtattttctctctcctggacaacttccccaggaaccccgtaccagcctgttgatcatcaataacacagaatcaaatattgaagattttataaaatcactgaagcatcaaaatatacttttggaagtagatgactttgaaaacagaaatggtactgatggcctctcatacaatggagctatcatagtttctggtaaacaaaaggattatagattttcagttgtgtgtaataccaagagattgcactgttttccaattcttatgaatattatcagcaatgggctacttcaaatgtttaatcacacacaacatattcgaattgagtcaagcccatttcctcttagccacataggactctggactgggttgccggatggttcctttttcttatttttggttctatgtagcatttctccttatatcaccatgggcagcatcagtgattacaagaaaaatgctaagtcccagctatggatttcaggcctctacacttctgcttactggtgtgggcaggcactagtggacgtcagcttcttcattttaattctccttttaatgtatttaattttctacatagaaaacatgcagtaccttcttattacaagccaaattgtgtttgctttggttatagttactcctggttatgcagcttctcttgtcttcttcatatatatgatatcatttatttttcgcaaaaggagaaaaaacagtggcctttggtcattttacttcttttttgcctccaccatcatgttttccatcactttaatcaatcattttgacctaagtatattgattaccaccatggtattggttccttcatataccttgcttggatttaaaacttttttggaagtgagagaccaggagcactacagagaatttccagaggcaaattttgaattgagtgccactgattttctagtctgcttcataccctactttcagactttgctattcgtttttgttctaagatgcatggaactaaaatgtggaaagaaaagaatgcgaaaagatcctgttttcagaatttccccccaaagtagagatgctaagccaaatccagaagaacccatagatgaagatgaagatattcaaacagaaagaataagaacagccactgctctgaccacttcaatcttagatgagaaacctgttataattgccagctgtctacacaaagaatatgcaggccagaagaaaagttgcttttcaaagaggaagaagaaaatagcagcaagaaatatctctttctgtgttcaagaaggtgaaattttgggattgctaggacccaatggtgctggaaaaagttcatctattagaatgatatctgggatcacaaagccaactgctggagaggtggaactgaaaggctgcagttcagttttgggccacctggggtactgccctcaagagaacgtgctgtggcccatgctgacgttgagggaacacctggaggtgtatgctgccgtcaaggggctcaggaaagcggacgcgaggctcgccatcgcaagattagtgagtgctttcaaactgcatgagcagctgaatgttcctgtgcagaaattaacagcaggaatcacgagaaagttgtgttttgtgctgagcctcctgggaaactcacctgtcttgctcctggatgaaccatctacgggcatagaccccacagggcagcagcaaatgtggcaggcaatccaggcagtcgttaaaaacacagagagaggtgtcctcctgaccacccataacctggctgaggcggaagccttgtgtgaccgtgtggccatcatggtgtctggaaggcttagatgcattggctccatccaacacctgaaaaacaaacttggcaaggattacattctagagctaaaagtgaaggaaacgtctcaagtgactttggtccacactgagattctgaagcttttcccacaggctgcagggcaggaaaggtattcctctttgttaacctataagctgcccgtggcagacgtttaccctctatcacagacctttcacaaattagaagcagtgaagcataactttaacctggaagaatacagcctttctcagtgcacactggagaaggtattcttagagctttctaaagaacaggaagtaggaaattttgatgaagaaattgatacaacaatgagatggaaactcctccctcattcagatgaaccttaaaacctcaaacctagtaattttttgttgatctcctataaactcatgttttatgtaataattaatagtatgtttaattttaaagatcatttaaaattaacatcaggtatattttgtaaatttagttaacaaatacataaattttaaaattattcttcctctcaaacataggggtgatagcaaacctgtgataaaggcaatacaaaatattagtaaagtcacccaaagagtcaggcactgggtattgtggaaataaaactatataaactt

SEQ ID NO: 350 - protein, 1617 aa, Homo Sapiens
MNMKQKSVYQQTKALLCKNFLKKWRMKRESLLEWGLSILLGLCIALFSSSMRNVQFPGMAPQNLGRVDKFNSSSLMVVYTPISNLTQQIMNKTALAPLLKGTSVIGAPNKTHMDEILLENLPYAMGIIFNETFSYKLIFFQGYNSPLWKEDFSAHCWDGYGEFSCTLTKYWNRGFVALQTAINTAIIEITTNHPVMEELMSVTAITMKTLPFITKNLLHNEMFILFFLLHFSPLVYFISLNVTKERKKSKNLMKMMGLQDSAFWLSWGLIYAGFIFIISIFVTIIITFTQIIVMTGFMVIFILFFLYGLSLVALVFLMSVLLKKAVLTNLVVFLLTLFWGCLGFTVFYEQLPSSLEWILNICSPFAFTTGMIQIIKLDYNLNGVIFPDPSGDSYTMIATFSMLLLDGLIYLLLALYFDKILPYGDERHYSPLFFLNSSSCFQHQRTNAKVIEKEIDAEHPSDDYFEPVAPEFQGKEAIRIRNVKKEYKGKSGKVEALKGLLFDIYEGQITAILGHSGAGKSSLLNILNGLSVPTEGSVTIYNKNLSEMQDLEEIRKITGVCPQFNVQFDILTVKENLSLFAKIKGIHLKEVEQEVQRILLELDMQNIQDNLAKHLSEGQKRKLTFGITILGDPQILLLDEPTTGLDPFSRDQVWSLLRERRADHVILFSTQSMDEADILADRKVIMSNGRLKCAGSSMFLKRRWGLGYHLSLHRNEICNPEQITSFITHHIPDAKLKTENKEKLVYTLPLERTNTFPDLFSDLDKCSDQGVTGYDISMSTLNEVFMKLEGQSTIEQDFEQVEMIRDSESLNEMELAHSSFSEMQTAVSDMGLWRMQVFAMARLRFLKLKRQTKVLLTLLLVFGIAIFPLIVENIMYAMLNEKIDWEFKNELYFLSPGQLPQEPRTSLLIINNTESNIEDFIKSLKHQNILLEVDDFENRNGTDGLSYNGAIIVSGKQKDYRFSVVCNTKRLHCFPILMNIISNGLLQMFNHTQHIRIESSPFPLSHIGLWTGLPDGSFFLFLVLCSISPYITMGSISDYKKNAKSQLWISGLYTSAYWCGQALVDVSFFILILLLMYLIFYIENMQYLLITSQIVFALVIVTPGYAASLVFFIYMISFIFRKRRKNSGLWSFYFFFASTIMFSITLINHFDLSILITTMVLVPSYTLLGFKTFLEVRDQEHYREFPEANFELSATDFLVCFIPYFQTLLFVFVLRCMELKCGKKRMRKDPVFRISPQSRDAKPNPEEPIDEDEDIQTERIRTATALTTSILDEKPVIIASCLHKEYAGQKKSCFSKRKKKIAARNISFCVQEGEILGLLGPNGAGKSSSIRMISGITKPTAGEVELKGCSSVLGHLGYCPQENVLWPMLTLREHLEVYAAVKGLRKADARLAIARLVSAFKLHEQLNVPVQKLTAGITRKLCFVLSLLGNSPVLLLDEPSTGIDPTGQQQMWQAIQAVVKNTERGVLLTTHNLAEAEALCDRVAIMVSGRLRCIGSIQHLKNKLGKDYILELKVKETSQVTLVHTEILKLFPQAAGQERYSSLLTYKLPVADVYPLSQTFHKLEAVKHNFNLEEYSLSQCTLEKVFLELSKEQEVGNFDEEIDTTMRWKLLPHSDEP

SEQ ID NO: 351 - DNA, 4481 bp, Homo Sapiens
ttcctgtctacgtttcatttcctgggggcttgccaagtgataaacagacccaggcgtgtgtggtagagttcgggttttttagcacgaagtgggtggctggagtttgcttgaaaacatcaattgactttgtgatcattacagaaatgctggtgtaaggtgttcagaagacaatggagaaaaaatggaaatactgtgctgtctattacatcatccagatacattttgtcaagggagtttgggaaaaaacagtcaacacagaagaaaatgtttatgctacacttggctctgatgtcaacctgacctgccaaacacagacagtaggcttcttcgtgcagatgcaatggtccaaggtcaccaataagatagacctgattgctgtctatcatccccaatacggcttctactgtgcctatgggagaccctgtgagtcacttgtgactttcacagaaactcctgagaatgggtcaaaatggactctgcacttaaggaatatgtcttgttcagtcagtggaaggtacgagtgtatgcttgttctgtatccagagggcattcagactaaaatctacaaccttctcattcagacacacgttacagcagatgaatggaacagcaaccatacgatagaaatagagataaatcagactctggaaataccatgctttcaaaatagctcctcaaaaatttcatctgagttcacctatgcatggtcggtggaaaacagcagcacggattcttgggtccttctttctaagggtataaaggaggataatggaactcaggaaacacttatctcccaaaatcacctcatcagcaattccacattacttaaagatagagtcaagcttggtacagactacagactccacctctctccagtccaaatcttcgatgatgggcggaagttctcttgccacattagagtcggtcctaacaaaatcttgaggagctccaccacagtcaaggtttttgctaaaccagaaatccctgtgattgtggaaaataactccacggatgtcttggtagagagaagatttacctgcttactaaagaatgtatttcccaaagcaaatatcacatggtttatagatggaagttttcttcatgatgaaaaagaaggaatatatattactaatgaagagagaaaaggcaaagatggatttttggaactgaagtctgttttaacaagggtacatagtaataaaccagcccaatcagacaacttgaccatttggtgtatggctctgtctccagtcccaggaaataaagtgtggaacatctcatcagaaaagatcacttttctcttaggttctgaaatttcctcaacagaccctccactgagtgttacagaatctacccttgacacccaaccttctccagccagcagtgtatctcctgcaagatatccagctacatcttcagtgacccttgtagatgtgagtgccttgaggccaaacaccactcctcaacccagcaattccagtatgactacccgaggcttcaactatccctggacctccagtgggacagataccaaaaaatcagtttcacggatacctagtgaaacatacagttcatccccgtcaggtgcaggctcaacacttcatgacaatgtctttaccagcacagccagagcattttcagaagtccccacaactgccaatggatctacgaaaactaatcacgtccatatcactggtattgtggtcaataagcccaaagatggaatgtcctggccagtgattgtagcagctttactcttttgctgcatgatattgtttggtcttggagtgagaaaatggtgtcagtaccaaaaagaaataatggaaagacctccacctttcaagccaccaccacctcccatcaagtacacttgcattcaagagcccaacgaaagtgatctgccttatcatgagatggagaccctctagtctcgtgagactttgccccatggcagaactctgctggaatcctattgagaaggtagacattgtgctttattaatatagtcgctcttcagccatgcctttgctgcagctgaaatggaagtcagaagtgagtgacctgttttcccagcaactcaccctcttccatctccaaacgcctgaagcttaaccaagagtgagaggatatgtcatgttcacactcaatgcaattcgtagtggttttcttgcttatgtaagaagtacatattagtctgccatctttaaaaaaaaatacagtattttcatttaaattctctgatggagggacaacaatggtttcaactgtatgcccatgcctgatcctcttatttgaacatctatcaacattgtaaactctttgccaaaatcctggggctttgctgcattccctaagataattacaggaaaaagaaaatgtaaaagtgctaacaaggctgccaagtaatggagaagtatggttagtcttcatattgaaattctgttgcttattttcatggaaggaaacagaatactttgcacaggaaccacattttcaatcctccttcactgtcttcctaccatgttcagcccagactcctgccacatggaccaggatgaagagggatcaaagagataattagccaaaaacccagtagcctagaagatacaaaactccactggcctctaaaattatattagccaagagtggtttcatttgagtgccttcgtgtgtatgtccatcaaactggaaccaaactgttttgtaagtaaacaggcagcctaagcccaaccctactttctaattccagttattctctttttcatctggggatttacctgttcatttaatctgcctgttttgatctgttttgaaaaagataaagagcctcaaatcagaccagcactgattaattaaccctgctcctaccaatcttttttaaagcagttgaagcagaatgtataggtgtcagagaagaaacctagtcagccagacgtgctctgtattcagcaatagtttgtgaatgaataaattactaatcctccttgtcgcttgaaaccttcccacactccctgctccaggagggaaaaacagatgttgttgacagatagagtgataggcaaattctgtgtggactttagtcccaaaaggaaactttagttcacttgcagtatgcttatccttgactgcacatgagaatgccttgtgcagagttatttggagattatgtctttttcttaaacaccatggctgtcacacttcagttcaattaaatcagaatgtctgaggagtgagacacaggcatcaacactctcaaatgattcacatgttcagccaaagttgagaaccatcgagcctgtggaagttctttctcatggctcagaatcttaggtaggtgcttaactcttgtggtggccagcctccaagatgagccccagtgttcttgcctcctactattcacatctttatgtggtcccctccaatgctgaatacagatgatttgtgtaacctgaggccaggattaaggggaggcaatcaatgcacctagggaaaaaatttaaggaggtattcacactcagggtcatgcacttgcacaatgttgagaatgagtaccactctcaccattggtatagccaaaaaagcttggaagtgaccaaggctaggtcacaaaatacactgtggcttcttctttgatctctctttgaccatactgacactgggaaaagcccattcccatgccatgaagacaccaaggcagccctattgagaaatctacctgtcgtggccgggcgcagtggctcacgcctgtaatcccagcactttgggaggccgaggtgggtggatcacgaggtcaggagatcgagaccatcctggctaacacagtgaaaccccgtctctactaaaaatacaaaaaattagccgggtgtggtgtcgggcacctgtagtcccagctactcaggaggctgaggcaggagaagggtgggaacccgggaggcagagcttgcagtgagccgagattgtgccactgcacactccaatctgggtgaaagaccgagactccgcctcaaaaaaaaaaaaaaaagaaagaaagaaagaaagaaagaaatctacctgtcaaggaactaaggtattttgctaacaagcaccaacttgccagccatgtaagggagccatcttggaagcagatcctccagcctccagtcaagtcttcagataattgcaacttcagttgatcttttgaccaagacctcaagagagccagaactacccagctaagccttttactaaatttctgaacttctaacactattagataataagtgcttattgtttaacaccattaattttgagtataatttgttacatagcgacagataactatacagctcaacaactagaaaaataaactgtttacctgccttaattatttatctttagttccttattagttctcaagaaacaaatgctagcttcatatgtatggctgttgctttgcttcatgtgtatggctatttgtatttaacaagacttaatcatcagta

SEQ ID NO: 352 - protein, 585 aa, Homo Sapiens
MEKKWKYCAVYYIIQIHFVKGVWEKTVNTEENVYATLGSDVNLTCQTQTVGFFVQMQWSKVTNKIDLIAVYHPQYGFYCAYGRPCESLVTFTETPENGSKWTLHLRNMSCSVSGRYECMLVLYPEGIQTKIYNLLIQTHVTADEWNSNHTIEIEINQTLEIPCFQNSSSKISSEFTYAWSVENSSTDSWVLLSKGIKEDNGTQETLISQNHLISNSTLLKDRVKLGTDYRLHLSPVQIFDDGRKFSCHIRVGPNKILRSSTTVKVFAKPEIPVIVENNSTDVLVERRFTCLLKNVFPKANITWFIDGSFLHDEKEGIYITNEERKGKDGFLELKSVLTRVHSNKPAQSDNLTIWCMALSPVPGNKVWNISSEKITFLLGSEISSTDPPLSVTESTLDTQPSPASSVSPARYPATSSVTLVDVSALRPNTTPQPSNSSMTTRGFNYPWTSSGTDTKKSVSRIPSETYSSSPSGAGSTLHDNVFTSTARAFSEVPTTANGSTKTNHVHITGIVVNKPKDGMSWPVIVAALLFCCMILFGLGVRKWCQYQKEIMERPPPFKPPPPPIKYTCIQEPNESDLPYHEMETL

SEQ ID NO: 353 - DNA, 2026 bp, Homo Sapiens
caatcccccctccccccccaatctgtctttctagcatgttgccctttttcaaccacatttgtgtttcaggtgtagagaggagagagagtgaacagggagcggggcttttgtctgttggtctccctggactgaagagagggagaatagaagcccaagactaagattctcaaaatggtttattacccagaactctttgtctgggtcagtcaagaaccatttccaaacaaggacatggagggaaggcttcctaagggaagacttcctgtcccaaaggaagtgaaccgcaagaagaacgatgagacaaacgctgcctccctgactccactgggcagcagtgaactccgctccccaagaatcagttacctccactttttttaatcgtaacacctccatttgtattacatatggtgtatgggtattgatgaggtcatggtatcatatatgggatttttttctgtgtaaatcatcaagtataagaagaaactatgggactctgagccttgctttagagaatttacagtggacaaataggtgtcatcaaaccagtttttaatcattctgactcaagtgaaaacgctcagaatttcacactgtgaatccacgtttacaacccttacaggtgggccttcaggcctggttcgctacaacaatgtcttccacaactcaaactcccaccgcgctcacacaaccggtccactcctgccttttcactcacacagctcccgactgcttcttgcagaggctgagagtcccccccccaccttttttttcatttagatgtaacaaacctagtagtttatgttcatcaattgtctgtatatctctatattttatccatgtactcttttgatgtatagaagtagtttgaaactcattgtttccttgtggtaagtgaccgagatgctgccacaggacctgagacactgatgaatggtgctattttggactttcaacatgctccttggcgaggtagctctgatggagttattttttatttccatgttctaagaaggtgttggtactctgtttccctgaatgttgttctctagactggattgacttgttttccttgtgtcttcagtgtggctttcttcctcagtgttgtaggttgagcgaatgctaccagagtgtgagagaccattgtctcgttggctggcgctcacggacatgcagtcacggtagcgggagcaatcacaaaactgtaatttacttaccaaatctcttcctttccgtagcctcgcctgcctgacttagagaaagaaaagcaataattttacaggcattttgaggtgtctctttgggttctttctgtttgaaaggatatttgtcgaaaaaaagagcaaaaccgttttaaataaactccccctggaaaaaaacccaaaacactggcatctgagtgggaatatgaaaatgacaccttttccaaatattaaattggaaaacaaggtctacaaaatcatgatacttttttaaaaggcagagcattcttttttcggcaattttgataagcaaggtgtagatttacatttttgtccttgctcccaacgaaatggataaacaaaaataaattaccatctactcatggaatgttgttgtgttagccagtctgaaagcccaccttaatttttatataactgtctttagctcttcttttgacagggcaggccttgttctgaactgtttcgcttctgactgttaaacaccgatgacgcatgcactgcacttcttcgttttcttcttgctcccccattggcctgagtttcttgtgcattactcctctccctccttcgttagaataggtatatcagctgtgtaaatagagcaagaaaacagtattctgcatctgtggcatttatgtagagttgcagttgtgtactgctgaaaatgcaggcttttgtaacagtgtgatctttactgatgcactcatgacaagtacccaatgtattttagctattttagtagtatttgttcaataaatacgcaagctgtaaggtaaaaaaaaaaaaaaaaaaaaaaaaaaaaaaaa

SEQ ID NO: 354 - protein, 68 aa, Homo Sapiens
MVYYPELFVWVSQEPFPNKDMEGRLPKGRLPVPKEVNRKKNDETNAASLTPLGSSELRSPRISYLHFF

SEQ ID NO: 355 - DNA, 4894 bp, Homo Sapiens
cgccgcgggaggcggacgagatgcgagcgcggccgcggccccggccgctctgggcgactgtgctggcgctgggggcgctggcgggcgttggcgtaggagggcccaacatctgtaccacgcgaggtgtgagctcctgccagcagtgcctggctgtgagccccatgtgtgcctggtgctctgatgaggccctgcctctgggctcacctcgctgtgacctgaaggagaatctgctgaaggataactgtgccccagaatccatcgagttcccagtgagtgaggcccgagtactagaggacaggcccctcagcgacaagggctctggagacagctcccaggtcactcaagtcagtccccagaggattgcactccggctccggccagatgattcgaagaatttctccatccaagtgcggcaggtggaggattaccctgtggacatctactacttgatggacctgtcttactccatgaaggatgatctgtggagcatccagaacctgggtaccaagctggccacccagatgcgaaagctcaccagtaacctgcggattggcttcggggcatttgtggacaagcctgtgtcaccatacatgtatatctccccaccagaggccctcgaaaacccctgctatgatatgaagaccacctgcttgcccatgtttggctacaaacacgtgctgacgctaactgaccaggtgacccgcttcaatgaggaagtgaagaagcagagtgtgtcacggaaccgagatgccccagagggtggctttgatgccatcatgcaggctacagtctgtgatgaaaagattggctggaggaatgatgcatcccacttgctggtgtttaccactgatgccaagactcatatagcattggacggaaggctggcaggcattgtccagcctaatgacgggcagtgtcatgttggtagtgacaatcattactctgcctccactaccatggattatccctctttggggctgatgactgagaagctatcccagaaaaacatcaatttgatctttgcagtgactgaaaatgtagtcaatctctatcagaactatagtgagctcatcccagggaccacagttggggttctgtccatggattccagcaatgtcctccagctcattgttgatgcttatgggaaaatccgttctaaagtagagctggaagtgcgtgacctccctgaagagttgtctctatccttcaatgccacctgcctcaacaatgaggtcatccctggcctcaagtcttgtatgggactcaagattggagacacggtgagcttcagcattgaggccaaggtgcgaggctgtccccaggagaaggagaagtcctttaccataaagcccgtgggcttcaaggacagcctgatcgtccaggtcacctttgattgtgactgtgcctgccaggcccaagctgaacctaatagccatcgctgcaacaatggcaatgggacctttgagtgtggggtatgccgttgtgggcctggctggctgggatcccagtgtgagtgctcagaggaggactatcgcccttcccagcaggacgaatgcagcccccgggagggtcagcccgtctgcagccagcggggcgagtgcctctgtggtcaatgtgtctgccacagcagtgactttggcaagatcacgggcaagtactgcgagtgtgacgacttctcctgtgtccgctacaagggggagatgtgctcaggccatggccagtgcagctgtggggactgcctgtgtgactccgactggaccggctactactgcaactgtaccacgcgtactgacacctgcatgtccagcaatgggctgctgtgcagcggccgcggcaagtgtgaatgtggcagctgtgtctgtatccagccgggctcctatggggacacctgtgagaagtgccccacctgcccagatgcctgcacctttaagaaagaatgtgtggagtgtaagaagtttgaccggggagccctacatgacgaaaatacctgcaaccgttactgccgtgacgagattgagtcagtgaaagagcttaaggacactggcaaggatgcagtgaattgtacctataagaatgaggatgactgtgtcgtcagattccagtactatgaagattctagtggaaagtccatcctgtatgtggtagaagagccagagtgtcccaagggccctgacatcctggtggtcctgctctcagtgatgggggccattctgctcattggccttgccgccctgctcatctggaaactcctcatcaccatccacgaccgaaaagaattcgctaaatttgaggaagaacgcgccagagcaaaatgggacacagccaacaacccactgtataaagaggccacgtctaccttcaccaatatcacgtaccggggcacttaatgataagcagtcatcctcagatcattatcagcctgtgccacgattgcaggagtccctgccatcatgtttacagaggacagtatttgtggggagggatttggggctcagagtggggtaggttgggagaatgtcagtatgtggaagtgtgggtctgtgtgtgtgtatgtgggggtctgtgtgtttatgtgtgtgtgttgtgtgtgggagtgtgtaatttaaaattgtgatgtgtcctgataagctgagctccttagcctttgtcccagaatgcctcctgcagggattcttcctgcttagcttgagggtgactatggagctgagcaggtgttcttcattacctcagtgagaagccagctttcctcatcaggccattgtccctgaagagaagggcagggctgaggcctctcattccagaggaagggacaccaagccttggctctaccctgagttcataaatttatggttctcaggcctgactctcagcagctatggtaggaactgctgggcttggcagcccgggtcatctgtacctctgcctcctttcccctccctcaggccgaaggaggagtcagggagagctgaactattagagctgcctgtgccttttgccatcccctcaacccagctatggttctctcgcaagggaagtccttgcaagctaattctttgacctgttgggagtgaggatgtctgggccactcaggggtcattcatggcctgggggatgtaccagcatctcccagttcataatcacaacccttcagatttgccttattggcagctctactctggaggtttgtttagaagaagtgtgtcacccttaggccagcaccatctctttacctcctaattccacaccctcactgctgtagacatttgctatgagctggggatgtctctcatgaccaaatgcttttcctcaaagggagagagtgctattgtagagccagaggtctggccctatgcttccggcctcctgtccctcatccatagcacctccacatacctggccctgtgccttggtgtgctgtatccatccatggggctgattgtatttaccttctacctcttggctgccttgtgaaggaattattcccatgagttggctgggaataagtgccaggatggaatgatgggtcagttgtatcagcacgtgtggcctgttcttctatgggttggacaacctcattttaactcagtctttaatctgagaggccacagtgcaattttattttatttttctcatgatgaggttttcttaacttaaaagaacatgtatataaacatgcttgcattatatttgtaaatttatgtgatggcaaagaaggagagcataggaaaccacacagacttgggcagggtacagacactcccacttggcatcattcacagcaagtcactggccagtggctggatctgtgaggggctctctcatgatagaaggctatggggatagatgtgtggacacattggacctttcctgaggaagagggactgttcttttgtcccagaaaagcagtggctccattggtgttgacatacatccaacattaaaagccacccccaaatgcccaagaaaaaaagaaagacttatcaacatttgttccatgagcagaaaactggagctctggcctcagtgttacagctaaataatctttaattaaggcaagtcactttcttcttcttaaagctgttttctagtttgagaaatgatgggattttagcagccagtcttgaaggtctctttcagtatcaacattctaagatgctgggacttactgtgtcatcaaatgtgcggttaagattctctgggatattgatactgtttgtgtttttagttgggagatctgagagacctggctttggcaagagcagatgtcattccatatcacctttctcaatgaaagtctcattctatcctctctccaaacccgttttccaacatttgttaatagttacgtctctcctgatgtagcacttaagcttcatttagttattatttctttcttcactttgcacacatttgcatccacatattagggaagaggaatccataagtagctgaaatatctattctgtattattgtgttaacattgagaataagccttggaattagatatggggcaatgactgagccctgtctcacccatggattactccttactgtagggaatggcagtatggtagagggataaatagggggcggggagggatagtcatggatccaagaagtccttagaaatagtggcagggaacaggtgtggaagctcatgcctgtaattataaccttcagctactaagacaggtgtggtggctcacgcctgtgattataatcttcagttactaagacagagtccatgagagtgttaatgggacattttctttagataagatgttttatatgaagaaactgtatcaaagggggaagaaaatgtatttaacaggtgaatcaaatcaggaatcttgtctgagctactggaatgaagttcacaggtcttgaagacca

SEQ ID NO: 356 - protein, 788 aa, Homo Sapiens
MRARPRPRPLWATVLALGALAGVGVGGPNICTTRGVSSCQQCLAVSPMCAWCSDEALPLGSPRCDLKENLLKDNCAPESIEFPVSEARVLEDRPLSDKGSGDSSQVTQVSPQRIALRLRPDDSKNFSIQVRQVEDYPVDIYYLMDLSYSMKDDLWSIQNLGTKLATQMRKLTSNLRIGFGAFVDKPVSPYMYISPPEALENPCYDMKTTCLPMFGYKHVLTLTDQVTRFNEEVKKQSVSRNRDAPEGGFDAIMQATVCDEKIGWRNDASHLLVFTTDAKTHIALDGRLAGIVQPNDGQCHVGSDNHYSASTTMDYPSLGLMTEKLSQKNINLIFAVTENVVNLYQNYSELIPGTTVGVLSMDSSNVLQLIVDAYGKIRSKVELEVRDLPEELSLSFNATCLNNEVIPGLKSCMGLKIGDTVSFSIEAKVRGCPQEKEKSFTIKPVGFKDSLIVQVTFDCDCACQAQAEPNSHRCNNGNGTFECGVCRCGPGWLGSQCECSEEDYRPSQQDECSPREGQPVCSQRGECLCGQCVCHSSDFGKITGKYCECDDFSCVRYKGEMCSGHGQCSCGDCLCDSDWTGYYCNCTTRTDTCMSSNGLLCSGRGKCECGSCVCIQPGSYGDTCEKCPTCPDACTFKKECVECKKFDRGALHDENTCNRYCRDEIESVKELKDTGKDAVNCTYKNEDDCVVRFQYYEDSSGKSILYVVEEPECPKGPDILVVLLSVMGAILLIGLAALLIWKLLITIHDRKEFAKFEEERARAKWDTANNPLYKEATSTFTNITYRGT

SEQ ID NO: 357 - DNA, 7346 bp, Homo Sapiens
gcgaggaggaaacggtgccggagcgcgcagggcttgctgccgccaccgccgctgcacaggctgccggagcgagcctgccgcgcgccgccctccccgctctccttcctgggcgagctgcggggatggggcggccgcgggagcccgagcgcgcgcaggaaccgccgccgccgccgcccgcgtctccgttgccgcgcgcctgagccgccgtcgccgccgcgcgccctgcccgggggcggcccccccagccccatggaggtctcccggaggaaggcgccgccgcgccccccgcgccccgcagcgccactgcccctgctcgcctatctgctggcactggcggctcccggccggggcgcggacgagcccgtgtggcggtcggagcaagccatcggagccatcgcggcgagccaggaggacggcgtgtttgtggcgagcggcagctgcctggaccagctggactacagcctggagcacagcctctcgcgcctgtaccgggaccaagcgggcaactgcacagagccggtctcgctggcgccccccgcgcggccccggcccgggagcagcttcagcaagctgctgctgccctaccgcgagggggcggccggcctcggggggctgctgctcaccggctggaccttcgaccggggcgcctgcgaggtgcggcccctgggcaacctgagccgcaactccctgcgcaacggcaccgaggtggtgtcgtgccacccgcagggctcgacggccggcgtggtgtaccgcgcgggccggaacaaccgctggtacctggcggtggccgccacctacgtgctgcctgagccggagacggcgagccgctgcaaccccgcggcatccgaccacgacacggccatcgcgctcaaggacacggaggggcgcagcctggccacgcaggagctggggcgcctcaagctgtgcgagggcgcgggcagcctgcacttcgtggacgcctttctctggaacggcagcatctacttcccctactacccctacaactacacgagcggcgctgccaccggctggcccagcatggcgcgcatcgcgcagagcaccgaggtgctgttccagggccaggcatccctcgactgcggccacggccaccccgacggccgccgcctgctcctctcctccagcctagtggaggccctggacgtctgggcgggagtgttcagcgcggccgctggagagggccaggagcggcgctcccccaccaccacggcgctctgcctcttcagaatgagtgagatccaggcgcgcgccaagagggtcagctgggacttcaagacggccgagagccactgcaaagaaggggatcaacctgaaagagtccaaccaatcgcatcatctaccttgatccattccgacctgacatccgtttatggcaccgtggtaatgaacaggactgttttattcttggggactggagatggccagttacttaaggttattcttggtgagaatttgacttcaaattgtccagaggttatctatgaaattaaagaagagacacctgttttctacaaactcgttcctgatcctgtgaagaatatctacatttatctaacagctgggaaagaggtgaggagaattcgtgttgcaaactgcaataaacataaatcctgttcggagtgtttaacagccacagaccctcactgcggttggtgccattcgctacaaaggtgcacttttcaaggagattgtgtacattcagagaacttagaaaactggctggatatttcgtctggagcaaaaaagtgccctaaaattcagataattcgaagcagtaaagaaaagactacagtgactatggtgggaagcttctctccaagacactcaaagtgcatggtgaagaatgtggactctagcagggagctctgccagaataaaagtcagcccaaccggacctgcacctgtagcatcccaaccagagcaacctacaaagatgtttcagttgtcaacgtgatgttctccttcggttcttggaatttatcagacagattcaactttaccaactgctcatcattaaaagaatgcccagcatgcgtagaaactggctgcgcgtggtgtaaaagtgcaagaaggtgtatccaccccttcacagcttgcgacccttctgattatgagagaaaccaggaacagtgtccagtggctgtcgagaagacatcaggaggaggaagacccaaggagaacaaggggaacagaaccaaccaggctttacaggtcttctacattaagtccattgagccacagaaagtatcgacattagggaaaagcaacgtgatagtaacgggagcaaactttacccgggcatcgaacatcacaatgatcctgaaaggaaccagtacctgtgataaggatgtgatacaggttagccatgtgctaaatgacacccacatgaaattctctcttccatcaagccggaaagaaatgaaggatgtgtgtatccagtttgatggtgggaactgctcttctgtgggatccttatcctacattgctctgccacattgttcccttatatttcctgctaccacctggatcagtggtggtcaaaatataaccatgatgggcagaaattttgatgtaattgacaacttaatcatttcacatgaattaaaaggaaacataaatgtctctgaatattgtgtggcgacttactgcgggtttttagcccccagtttaaagagttcaaaagtgcgcacgaatgtcactgtgaagctgagagtacaagacacctacttggattgtggaaccctgcagtatcgggaggaccccagattcacggggtatcgggtggaatccgaggtggacacagaactggaagtgaaaattcaaaaagaaaatgacaacttcaacatttccaaaaaagacattgaaattactctcttccatggggaaaatgggcaattaaattgcagttttgaaaatattactagaaatcaagatcttaccaccatcctttgcaaaattaaaggcatcaagactgcaagcaccattgccaactcttctaagaaagttcgggtcaagctgggaaacctggagctctacgtcgagcaggagtcagttccttccacatggtattttctgattgtgctccctgtcttgctagtgattgtcatttttgcggccgtgggggtgaccaggcacaaatcgaaggagctgagtcgcaaacagagtcaacaactagaattgctggaaagcgagctccggaaagagatacgtgacggctttgctgagctgcagatggataaattggatgtggttgatagttttggaactgttcccttccttgactacaaacattttgctctgagaactttcttccctgagtcaggtggcttcacccacatcttcactgaagatatgcataacagagacgccaacgacaagaatgaaagtctcacagctttggatgccctaatctgtaataaaagctttcttgttactgtcatccacacccttgaaaagcagaagaacttttctgtgaaggacaggtgtctgtttgcctccttcctaaccattgcactgcaaaccaagctggtctacctgaccagcatcctagaggtgctgaccagggacttgatggaacagtgtagtaacatgcagccgaaactcatgctgagacgcacggagtccgtcgtcgaaaaactcctcacaaactggatgtccgtctgcctttctggatttctccgggagactgtcggagagcccttctatttgctggtgacgactctgaaccagaaaattaacaagggtcccgtggatgtaatcacttgcaaagccctgtacacacttaatgaagactggctgttgtggcaggttccggaattcagtactgtggcattaaacgtcgtctttgaaaaaatcccggaaaacgagagtgcagatgtctgtcggaatatttcagtcaatgttctcgactgtgacaccattggccaagccaaagaaaagattttccaagcattcttaagcaaaaatggctctccttatggacttcagcttaatgaaattggtcttgagcttcaaatgggcacacgacagaaagaacttctggacatcgacagttcctccgtgattcttgaagatggaatcaccaagctaaacaccattggccactatgagatatcaaatggatccactataaaagtctttaagaagatagcaaattttacttcagatgtggagtactcggatgaccactgccatttgattttaccagattcggaagcattccaagatgtgcaaggaaagagacatcgagggaagcacaagttcaaagtaaaagaaatgtatctgacaaagctgctgtcgaccaaggtggcaattcattctgtgcttgaaaaactttttagaagcatttggagtttacccaacagcagagctccatttgctataaaatacttttttgactttttggacgcccaggctgaaaacaaaaaaatcacagatcctgacgtcgtacatatttggaaaacaaacagccttcctcttcgcttctgggtaaacatcctgaagaaccctcagtttgtctttgacattaagaagacaccacatatagacggctgtttgtcagtgattgcccaggcattcatggatgcattttctctcacagagcagcaactagggaaggaagcaccaactaataagcttctctatgccaaggatatcccaacctacaaagaagaagtaaaatcttattacaaagcaatcagggatttgcctccattgtcatcctcagaaatggaagaatttttaactcaggaatctaagaaacatgaaaatgaatttaatgaagaagtggccttgacagaaatttacaaatacatcgtaaaatattttgatgagattctaaataaactagaaagagaacgagggctggaagaagctcagaaacaactcttgcatgtaaaagtcttatttgatgaaaagaagaaatgcaagtggatgtaagcactctggggcctggcttaatctggcaaagttcttcagacgacttgggagcaaaatggctgcttgagctactctgtgtcgttaatttgttgtttgcacataggttccactttgggcactgtctttttaagagaccaaggcacatgcacagcttttagaaagcataccaacccttgtgcctgtgtgtataccgtgggaacccttctgtaaatagagttgaagtggttgttgcaaacagcctccttgtttacagagaatacaaggccagtaagcgaatgtcagtattgtaactacagtctccacttaagcacaatgatataagtggttttgtttgaaaactacagctatgtagcacttgtgctacactgcacctctgcattgtaaagggatactgccagtgctcaaaacaaaatgtgaaatgagtcatttggaaacaaggtgggggtgttagggcaacctcgaggatttgcagcattgaaactttccccagtagttcttggaaaagctgaccgcagaatttggtagtgtacacttagcatttgtgagtgtgtgtgtgtgtttaaaccaaaaactaacagtgttgcaacattgttgaaagggctcgtgtttttcagtggtcatcaactgcactccatcaaactcacctccatttcaccaaggagctctaaagtaaggagagtgggctttatttaaatgaacagcattttaaccagatactttgtcctaatgtatgttccttttcttcatctgttttttcatactaaatgtatttgatagtggacatgttggatattatacaaaaaaatcattaattcatttctgttccaaaacctttgatcagaacgatctgtggaagagtaactccatttctatatgagtgagtgtctccttgctttagatttctggtgaaccctgtggttatgaatacttgtgtgtgatttaaaaaaaaaaagatacattttacatttcatcgaattgctgttcacactggagtattatatataaatatatatatttgaggcccaaggcctgaaaaatattagtatacaacttggtatcttagtcttactatgtactttttgaaagtattcctcgcaggagaaagaatttaaaatacccattttattcatgcctttctttttaaagaattctctatccagttatactgtagtctttttagtgctgattttttaattcctgaatttttgctgctcatgaccagttttaataccactgtgttttccttctattaaaccagaagaagtaaacagcataattggcaactcttgagcttttcttgtggcaggcaccttttacccttggtgctccaaatcccccatctaggaaagaaaattttttcaagtcaaataacattgatcacatattccttgaaatcatttaccaacactgtatggagcattaggatttaaatatgaatttgtcttaaaggcaattcctttttgcttctgtattatctggaaaagcatgagagaggtgacacctcaacaaactgatcagagaaaataagcagttactaccctgataggcaccttcccaatcctgttgcttttgaccattgtctgtccaacggacacacctcaaacaaacaaaactaccaaatagatgacagatcagaataaaggtgagaggtctggtccccattgaaggctgctacagtcttcaaagaggtgaaggagttcataagagaacaacagtaggaaagttgagagccaagggtaggagagttgcccaaaagacttcccctactactttagggtactgaaaactcaaaggatcagctacagctttatctaagtatttactaaatgctacatgagggtgtccctgtccagctttctggcacatgagtcctgtgtggagagttacctcctcttccagggactgtgctgttgggaactttgggcaagtcacttacctctttgtgcctcaatttctgtataatatttctaagctacctcactgaggtggtatgaagattcactaatgtatgtagcgtgtttgtcaatcctccagtgaaaagcactatctagatcacattttggatcacattagccaaatgcagtaaatggccaaattagatgtgtgctgaagacaatcagtcactgggtctatattaaacagcaaccagagcaacaaatggcaaacaatttctattttcaagtttctttgcatatttttttggtgcaaaaccatttataaacttttttttctaacactagtgtctacagcagcattcaaaaaaattctgttaccttttctgtattaggatttaaagtctatttcttattgtatacctgattgaagctgttcttggagatgaatgttttaaatgtctatatccaaaaaataaacattttgatgtaactgtg

SEQ ID NO: 358 - protein, 1568 aa, Homo Sapiens
MEVSRRKAPPRPPRPAAPLPLLAYLLALAAPGRGADEPVWRSEQAIGAIAASQEDGVFVASGSCLDQLDYSLEHSLSRLYRDQAGNCTEPVSLAPPARPRPGSSFSKLLLPYREGAAGLGGLLLTGWTFDRGACEVRPLGNLSRNSLRNGTEVVSCHPQGSTAGVVYRAGRNNRWYLAVAATYVLPEPETASRCNPAASDHDTAIALKDTEGRSLATQELGRLKLCEGAGSLHFVDAFLWNGSIYFPYYPYNYTSGAATGWPSMARIAQSTEVLFQGQASLDCGHGHPDGRRLLLSSSLVEALDVWAGVFSAAAGEGQERRSPTTTALCLFRMSEIQARAKRVSWDFKTAESHCKEGDQPERVQPIASSTLIHSDLTSVYGTVVMNRTVLFLGTGDGQLLKVILGENLTSNCPEVIYEIKEETPVFYKLVPDPVKNIYIYLTAGKEVRRIRVANCNKHKSCSECLTATDPHCGWCHSLQRCTFQGDCVHSENLENWLDISSGAKKCPKIQIIRSSKEKTTVTMVGSFSPRHSKCMVKNVDSSRELCQNKSQPNRTCTCSIPTRATYKDVSVVNVMFSFGSWNLSDRFNFTNCSSLKECPACVETGCAWCKSARRCIHPFTACDPSDYERNQEQCPVAVEKTSGGGRPKENKGNRTNQALQVFYIKSIEPQKVSTLGKSNVIVTGANFTRASNITMILKGTSTCDKDVIQVSHVLNDTHMKFSLPSSRKEMKDVCIQFDGGNCSSVGSLSYIALPHCSLIFPATTWISGGQNITMMGRNFDVIDNLIISHELKGNINVSEYCVATYCGFLAPSLKSSKVRTNVTVKLRVQDTYLDCGTLQYREDPRFTGYRVESEVDTELEVKIQKENDNFNISKKDIEITLFHGENGQLNCSFENITRNQDLTTILCKIKGIKTASTIANSSKKVRVKLGNLELYVEQESVPSTWYFLIVLPVLLVIVIFAAVGVTRHKSKELSRKQSQQLELLESELRKEIRDGFAELQMDKLDVVDSFGTVPFLDYKHFALRTFFPESGGFTHIFTEDMHNRDANDKNESLTALDALICNKSFLVTVIHTLEKQKNFSVKDRCLFASFLTIALQTKLVYLTSILEVLTRDLMEQCSNMQPKLMLRRTESVVEKLLTNWMSVCLSGFLRETVGEPFYLLVTTLNQKINKGPVDVITCKALYTLNEDWLLWQVPEFSTVALNVVFEKIPENESADVCRNISVNVLDCDTIGQAKEKIFQAFLSKNGSPYGLQLNEIGLELQMGTRQKELLDIDSSSVILEDGITKLNTIGHYEISNGSTIKVFKKIANFTSDVEYSDDHCHLILPDSEAFQDVQGKRHRGKHKFKVKEMYLTKLLSTKVAIHSVLEKLFRSIWSLPNSRAPFAIKYFFDFLDAQAENKKITDPDVVHIWKTNSLPLRFWVNILKNPQFVFDIKKTPHIDGCLSVIAQAFMDAFSLTEQQLGKEAPTNKLLYAKDIPTYKEEVKSYYKAIRDLPPLSSSEMEEFLTQESKKHENEFNEEVALTEIYKYIVKYFDEILNKLERERGLEEAQKQLLHVKVLFDEKKKCKWM

SEQ ID NO: 359 - DNA, 8482 bp, Homo Sapiens
gcgcgcagtgagaggcgccggggctgccgcccggtgctcggcgcgctctcgggagccgcccgcccgctggtcccgcagccttccgggaggaagcggtgccggcagcgtccagggcgcgctctcgggcaccctcacctgccggcgcccggccgcttacccggcagggcgtgcgcagggtagggtgcgggaccggggggacctggaggcagaggggagaaccggccgtccgcgccgcagcacagccgctgggagcgcctcagaccccgcgcggggcgccggctccatggcgaccgggctcggggagccggtctatggactttccgaagacgagggagagtcccgtattctcagagtaaaagttgtttctggaattgatctcgccaaaaaggacatctttggagccagtgatccgtatgtgaaactttcattgtacgtagcggatgagaatagagaacttgctttggtccagacaaaaacaattaaaaagacactgaacccaaaatggaatgaagaattttatttcagggtaaacccatctaatcacagactcctatttgaagtatttgacgaaaatagactgacacgagacgacttcctgggccaggtggacgtgccccttagtcaccttccgacagaagatccaaccatggagcgaccctatacatttaaggactttctcctcagaccaagaagtcataagtctcgagttaagggatttttgcgattgaaaatggcctatatgccaaaaaatggaggtcaagatgaagaaaacagtgaccagagggatgacatggagcatggatgggaagttgttgactcaaatgactcggcttctcagcaccaagaggaacttcctcctcctcctctgcctcccgggtgggaagaaaaagtggacaatttaggccgaacttactatgtcaaccacaacaaccggaccactcagtggcacagaccaagcctgatggacgtgtcctcggagtcggacaataacatcagacagatcaaccaggaggcagcacaccggcgcttccgctcccgcaggcacatcagcgaagacttggagcccgagccctcggagggcggggatgtccccgagccttgggagaccatttcagaggaagtgaatatcgctggagactctctcggtctggctctgcccccaccaccggcctccccaggatctcggaccagccctcaggagctgtcagaggaactaagcagaaggcttcagatcactccagactccaatggggaacagttcagctctttgattcaaagagaaccctcctcaaggttgaggtcatgcagtgtcaccgacgcagttgcagaacagggccatctaccaccgcccagtgccccagctgggagagcgcgttcatcaactgtcacgggtggtgaggaaccaacgccatcagtggcctatgtacataccacgccgggtctgccttcaggctgggaagaaagaaaagatgctaaggggcgcacatactatgtcaatcataacaatcgaaccacaacttggactcgacctatcatgcagcttgcagaagatggtgcgtccggatcagccacaaacagtaacaaccatctaatcgagcctcagatccgccggcctcgtagcctcagctcgccaacagtaactttatctgccccgctggagggtgccaaggactcacccgtacgtcgggctgtgaaagacaccctttccaacccacagtccccacagccatcaccttacaactcccccaaaccacaacacaaagtcacacagagcttcttgccacccggctgggaaatgaggatagcgccaaacggccggcccttcttcattgatcataacacaaagactacaacctgggaagatccacgtttgaaatttccagtacatatgcggtcaaagacatctttaaaccccaatgaccttggcccccttcctcctggctgggaagaaagaattcacttggatggccgaacgttttatattgatcataatagcaaaattactcagtgggaagacccaagactgcagaacccagctattactggtccggctgtcccttactccagagaatttaagcagaaatatgactacttcaggaagaaattaaagaaacctgctgatatccccaataggtttgaaatgaaacttcacagaaataacatatttgaagagtcctatcggagaattatgtccgtgaaaagaccagatgtcctaaaagctagactgtggattgagtttgaatcagagaaaggtcttgactatgggggtgtggccagagaatggttcttcttactgtccaaagagatgttcaacccctactacggcctctttgagtactctgccacggacaactacacccttcagatcaaccctaattcaggcctctgtaatgaggatcatttgtcctacttcacttttattggaagagttgctggtctggccgtatttcatgggaagctcttagatggtttcttcattagaccattttacaagatgatgttgggaaagcagataaccctgaatgacatggaatctgtggatagtgaatattacaactctttgaaatggatcctggagaatgaccctactgagctggacctcatgttctgcatagacgaagaaaactttggacagacatatcaagtggatttgaagcccaatgggtcagaaataatggtcacaaatgaaaacaaaagggaatatatcgacttagtcatccagtggagatttgtgaacagggtccagaagcagatgaacgccttcttggagggattcacagaactacttcctattgatttgattaaaatttttgatgaaaatgagctggagttgctcatgtgcggcctcggtgatgtggatgtgaatgactggagacagcattctatttacaagaacggctactgcccaaaccaccccgtcattcagtggttctggaaggctgtgctactcatggacgccgaaaagcgtatccggttactgcagtttgtcacagggacatcgcgagtacctatgaatggatttgccgaactttatggttccaatggtcctcagctgtttacaatagagcaatggggcagtcctgagaaactgcccagagctcacacatgctttaatcgccttgacttacctccatatgaaacctttgaagatttacgagagaaacttctcatggccgtggaaaatgctcaaggatttgaaggggtggattaagcaccctgtgcctcgggggtggttgttcttcaagcaagttctgcttgcacttttgcatttgcctaacagacttttgcagaggcgatggcagagagcagctgcaggcatggtccctggagccgagccttcaccacgcactcgtccaagttcggatgcgggaacctggtcccagcttgagttcctgcctttcccaccacaaattatcaactggttgatgtgtacactaattacatttcaggaggacttaatgctatttatgttgtgcctctgcaggcaaagcccttaataaatattttacatcctttctaatgacaatgaatggaattaatcactcaacaggtatagtattacgactcatgtttactttttaaaatgatttagaccgattttcagattttatttcgttatgattaaagatgtctcatgtacttggaaaagtgagcattttttttttttttgtatttcactttcataccaggcttaatgtcaatgacatttttatttttgaagtactctgacacctccaccctctactttattagaattggaaggcaaatttttgtccaaaaacctacagacaagtactttgagagaatttccaatataatattagacataatgataattttttccatactcagaatgaaaaactggatattacgtttttgttttggggtttttttgtacaaatttagctaatagctacaggctgagagaattgtaacatagcatgacaaattttgtgttgacttgaaaggaatcacaccattattccttagaagtaattacatgtgttctaacacatttgagacagggttggactcccatttctcatccgagaaattacttaacccttcctggcgctgtacagtcatcttttattctatttcctctttgctgtttgtagtagagacattttgaatgaaacttggcactgcttgattcaaaactgtggaaaccagatctgtttagtctcctgtttgtatgcgtttgctaatggtagctaaataaccagtttttgttgtaaatgcaccaattctgaaggcactttatgtactacatggaggtcatatctggttttgtttttatttttttatcatgaacattaaatgtgatgatgatttcttttccctgcacacatctttccggtgcaatatctatcaattgtgaatctggctgctggtgtataaaaacctggatgtaaagctgagcctacagacctgtcctcaccaactgttttgtgatttctactcaactacaaagatttatttaatgtactcttaatctaactgagttttgttaccaatgacctgttgcatgcttcaataccgtgtactgcctgagttgtgcctcttgtgtgctagattaaaagtgagacagagacttgacttgatcctctgagctcaagctattgagctggtagtggcagaggactgagggtacctgcacagtttgattcttttccacgtgtaagtctccattgcagaattgtcgtgctttgagaaaacacctgaggcagtgtgggagttgaacgaccctgctgtcctttttaacctgtgttgtcctagaccctgtcggggcagtcaggggacactagagatttgatctcatgcgagtcatcaataggacaaaaaagttgtggtttggggaggtctgtttgttacataaaaaggacctttcggtgtaagaaattgccgtttttaccctgccctggctggcatgtgagaagccatggaaggttgtggttgtaaatgagttgtctaaaggggtgcagaggcctgaggtttctaaaagaaggtagatttctacagagctgagtgttggttcctttttcttattggttgaaaattacctggtagtgatcagaaaacttagatgctatgtaactaaaaaaaaaaaaaaaaaaaaaaaaaaaaaaaaaaaaattcccgctcatgagttttgactattggtgagatgttttccgctacagttaacatgacaaatgtctcagtggcaaaaatcccctttttgtaagcccccatagtctagaggcagttttctttttaagaatcatgccagagcctgagtcgagcagtatgctttcttggtttttgagagtaattgtgtaattgtagagggagaaatccaattctaacctaagaactgggattcttctgtcatcttgtaaaccgtatattgaaaaaaacagaatgtcactaaatgcatattaagtcaagtattggaaagtataaaagaaaaatcattctgacaatttctaagccagaagcaaacaagaattactgaaatctaccccatgaatacttggaaggcagtaattgtgagtgacacctcagttcatcaaccccttaataatatcagcttaattttaatgacaactaaatatgctgaagtgaggatttagtattttttaaaaaagcaaaacaaggttcagtagtcctcagcaattctccaagtttctctctttgcctaaaatggtcatagatcttgatttctctgaatcgtgatgaccacacccagtcatcttcacagcataattgcaggtggcagtaaagagagtgtgctgggtaaggagcagttgctgggtcattccttgggccccgacctgcccggggagtagccctgggggagagagggcagtgttgcctatcccagaggtcccagcagtcacactgctctgcaggccgggctctctttatagccagagaaatcaccttaatgcagtctctttagttgtctgctgaagctgtagttattatgggccacttacatgaggctgagaagtacgtgccggagctcacacactgcctgttgcggttctcttaacatcagttatcacagctgcctgtgggtcccgggtatttccattcctgccccttgttggcccgaggaaggatgtggaaagagcacctggtgggatgaaggtccaacagcctgtgcctctccactgctggccctggagccggcagcagtgaggcattcattgtctgtgttgcggtgtattcccagcttcagtgctcttttcctttttgcctgaaatgtttatgcttctctgcagccagtcctctaacaaatctcaagaacaaaggtaagacacttggtttttgtttccaggacccttcagaaggtgacatcagatattccctaaattcagacaatgagggatacagagcgacttggcatgtattatttctcccatgtaaggacaaagggacagattattattgttatttctgagacagagtcttgctctgtagctcaggctggagtgcagtggctcaatctcagctcaccacaacctctgcctcctggcttcaagcgattcttctgcctcagcctccccgaatagttgggattacaggcacccaccaccacgcctggctaatttttgtatttttagtagagatggtttcaccatgctggccaggctggtcttgaactcctgacctcaggtgatcctcccgcctcagccttccaaagtgctgggattacaagcatgagccaccgcacccggcctcacagtgacagattctgagaaacagcatgcaaaacatttgaaccattttctacatctcccattgttgcatagagagtgtgcaccgctgctatcttgccagatccacactggtcctcccgaaagccaggttcatacacagcaactttttaattattctaacagttacccattaacagtcgactcctgtatttctgagagtcttgtactcacctctgaaatttaaaaacgtataaagagagcctgggttaatcagttctgcagcccctacgtgacactgtgctagttctccttcttctgtctcctccttaccctggccctgcacccctgtacttaagagggagaggtgggaggtgctgtctggtatcatttgctgcctcgccagtagagggtgccgctgtgcagggtaactgcccgcctgctcccttcctgacctcccctgaccccgaagatcactacctctgtcattcaggcattggggtacatcctgataagtcgtgtcagaactgccaatttcaggactgagatgtgtttttaaaaaacaaatccttataaactccactttgtactttagattttaaaactggggaaaaatgtgatattctttggaccacttttttaatttatataagccttaatgaacagtgtctatacatttgcatacacacacccccaccccagagtgttctcagtatgtcagagaaagtgccacagcattaggacgggagcttggagaacgttttctagaaaagggttagcttcctgttggcatgaaattttccaagcaaacctcattaaacatctgttgtttgttaaagatgttccactgaaagcaacgcatgtttcaaaggcacgtctttccgttcgttggttttctgtgtgtaaggagtagcattgctgttggcgcctaacctcgcgtgcactgcattctcaaccccgtaccagtgcatcatcagaagccttcctcgtgaccataactctgtgtctgcagatatgtgttcccgtgtaagccagttttccccttttactcagactgatttcacctagattgtcacggtttccttcatgttaactttgcgtgactttgttcttcctttactactctgtatgtaatatatatacatatatacgtacatatgctgtccaaatatatttgtatatatttgtatagcatttttacacctttattgagtaatctggtttcgaaaggaggtgagagtttagtcccttctgcagttttctccaagctgtgtcctgtgaatttcaacccttggagcctaagaaaaccctaggaagatgatgttaatttgctgtcatttcctaattcaggatctatcatcaaatgaaacatgaaaaaaacagtgacttttaaggtgaaaagagtttcaagcattccaaataaattatcaatgtttcataactttttattataaacccacctcctaataggaagccaagtactatttgatacagtggtaaaaaccaaactaccttgaatttttttaaggcaacttatgaataatgctcattttcacagtcagaatagctttaaaatatggttgaatttgatacacacaggaagttttcttgaagaacaatcctttcgcttttcttttttcttgagagatctaaagagaaactgtagattgttttcctgacagcaaaagactaatgtgacaaaatgaagtcattgtaaagaagcgatgcaacttgtcaaatatttaataaagaattatggaagctggaacattttctac

SEQ ID NO: 360 - protein, 975 aa, Homo Sapiens
MATGLGEPVYGLSEDEGESRILRVKVVSGIDLAKKDIFGASDPYVKLSLYVADENRELALVQTKTIKKTLNPKWNEEFYFRVNPSNHRLLFEVFDENRLTRDDFLGQVDVPLSHLPTEDPTMERPYTFKDFLLRPRSHKSRVKGFLRLKMAYMPKNGGQDEENSDQRDDMEHGWEVVDSNDSASQHQEELPPPPLPPGWEEKVDNLGRTYYVNHNNRTTQWHRPSLMDVSSESDNNIRQINQEAAHRRFRSRRHISEDLEPEPSEGGDVPEPWETISEEVNIAGDSLGLALPPPPASPGSRTSPQELSEELSRRLQITPDSNGEQFSSLIQREPSSRLRSCSVTDAVAEQGHLPPPSAPAGRARSSTVTGGEEPTPSVAYVHTTPGLPSGWEERKDAKGRTYYVNHNNRTTTWTRPIMQLAEDGASGSATNSNNHLIEPQIRRPRSLSSPTVTLSAPLEGAKDSPVRRAVKDTLSNPQSPQPSPYNSPKPQHKVTQSFLPPGWEMRIAPNGRPFFIDHNTKTTTWEDPRLKFPVHMRSKTSLNPNDLGPLPPGWEERIHLDGRTFYIDHNSKITQWEDPRLQNPAITGPAVPYSREFKQKYDYFRKKLKKPADIPNRFEMKLHRNNIFEESYRRIMSVKRPDVLKARLWIEFESEKGLDYGGVAREWFFLLSKEMFNPYYGLFEYSATDNYTLQINPNSGLCNEDHLSYFTFIGRVAGLAVFHGKLLDGFFIRPFYKMMLGKQITLNDMESVDSEYYNSLKWILENDPTELDLMFCIDEENFGQTYQVDLKPNGSEIMVTNENKREYIDLVIQWRFVNRVQKQMNAFLEGFTELLPIDLIKIFDENELELLMCGLGDVDVNDWRQHSIYKNGYCPNHPVIQWFWKAVLLMDAEKRIRLLQFVTGTSRVPMNGFAELYGSNGPQLFTIEQWGSPEKLPRAHTCFNRLDLPPYETFEDLREKLLMAVENAQGFEGVD

SEQ ID NO: 361 - DNA, 2073 bp, Homo Sapiens
agatgccacgccccatagctccaccagtcaccgcggcacagtggcccttaagcgaggagcggcggcgcccgcagcaatcacagcagtgccgacgtcgtgggtgtttggtgtgaggctgcgagccgccgcgagttctcacggtcccgccggcgccaccaccgcggtcactcaccgccgccgccgccaccactgccaccacggtcgcctgccacaggtgtctgcaattgaactccaaggtgcagaatggtttggaaagtagctgtattcctcagtgtggccctgggcattggtgccgttcctatagatgatcctgaagatggaggcaagcactgggtggtgatcgtggcaggttcaaatggctggtataattataggcaccaggcagacgcgtgccatgcctaccagatcattcaccgcaatgggattcctgacgaacagatcgttgtgatgatgtacgatgacattgcttactctgaagacaatcccactccaggaattgtgatcaacaggcccaatggcacagatgtctatcagggagtcccgaaggactacactggagaggatgttaccccacaaaatttccttgctgtgttgagaggcgatgcagaagcagtgaagggcataggatccggcaaagtcctgaagagtggcccccaggatcacgtgttcatttacttcactgaccatggatctactggaatactggtttttcccaatgaagatcttcatgtaaaggacctgaatgagaccatccattacatgtacaaacacaaaatgtaccgaaagatggtgttctacattgaagcctgtgagtctgggtccatgatgaaccacctgccggataacatcaatgtttatgcaactactgctgccaaccccagagagtcgtcctacgcctgttactatgatgagaagaggtccacgtacctgggggactggtacagcgtcaactggatggaagattcggacgtggaagatctgactaaagagaccctgcacaagcagtaccacctggtaaaatcgcacaccaacaccagccacgtcatgcagtatggaaacaaaacaatctccaccatgaaagtgatgcagtttcagggtatgaaacgcaaagccagttctcccgtccccctacctccagtcacacaccttgacctcacccccagccctgatgtgcctctcaccatcatgaaaaggaaactgatgaacaccaatgatctggaggagtccaggcagctcacggaggagatccagcggcatctggatgccaggcacctcattgagaagtcagtgcgtaagatcgtctccttgctggcagcgtccgaggctgaggtggagcagctcctgtccgagagagccccgctcacggggcacagctgctacccagaggccctgctgcacttccggacccactgcttcaactggcactcccccacgtacgagtatgcgttgagacatttgtacgtgctggtcaacctttgtgagaagccgtatccgcttcacaggataaaattgtccatggaccacgtgtgccttggtcactactgaagagctgcctcctggaagcttttccaagtgtgagcgccccaccgactgtgtgctgatcagagactggagaggtggagtgagaagtctccgctgctcgggccctcctggggagcccccgctccagggctcgctccaggaccttcttcacaagatgacttgctcgctgttacctgcttccccagtcttttctgaaaaactacaaattagggtgggaaaagctctgtattgagaagggtcatatttgctttctaggaggtttgttgttttgcctgttagttttgaggagcaggaagctcatgggggcttctgtagcccctctcaaaaggagtctttattctgagaatttgaagctgaaacctctttaaatcttcagaatgattttattgaagagggccgcaagccccaaatggaaaactgtttttagaaaatatgatgatttttgattgcttttgtatttaattctgcaggtgttcaagtcttaaaaaataaagatttataacagaacccaaataaaaaaaaaaaaaaaaa

SEQ ID NO: 362 - protein, 433 aa, Homo Sapiens
MVWKVAVFLSVALGIGAVPIDDPEDGGKHWVVIVAGSNGWYNYRHQADACHAYQIIHRNGIPDEQIVVMMYDDIAYSEDNPTPGIVINRPNGTDVYQGVPKDYTGEDVTPQNFLAVLRGDAEAVKGIGSGKVLKSGPQDHVFIYFTDHGSTGILVFPNEDLHVKDLNETIHYMYKHKMYRKMVFYIEACESGSMMNHLPDNINVYATTAANPRESSYACYYDEKRSTYLGDWYSVNWMEDSDVEDLTKETLHKQYHLVKSHTNTSHVMQYGNKTISTMKVMQFQGMKRKASSPVPLPPVTHLDLTPSPDVPLTIMKRKLMNTNDLEESRQLTEEIQRHLDARHLIEKSVRKIVSLLAASEAEVEQLLSERAPLTGHSCYPEALLHFRTHCFNWHSPTYEYALRHLYVLVNLCEKPYPLHRIKLSMDHVCLGHY

SEQ ID NO: 363 - DNA, 3261 bp, Homo Sapiens
gcttggaagccagcgctgcgctccccgtgggaagcgatcgtctcctctgtcaactcgcgcctgggcacttagcccctcccgtttcagggcgccgcctccccggatggcaaacactataaagtggcggcgaataaggttcctcctgctgctctcggtttagtccaagatcagcgatatcacgcgtcccccggagcatcgcgtgcaggagccatggcgcgggagctataccacgaagagttcgcccgggcgggcaagcaggcggggctgcaggtctggaggattgagaagctggagctggtgcccgtgccccagagcgctcacggcgacttctacgtcggggatgcctacctggtgctgcacacggccaagacgagccgaggcttcacctaccacctgcacttctggctcggaaaggagtgttcccaggatgaaagcacagctgctgccatcttcactgttcagatggatgactatttgggtggcaagccagtgcagaatagagaacttcaaggatatgagtctaatgactttgttagctatttcaaaggcggtctgaaatacaaggctggaggcgtggcatctggattaaatcatgttcttacgaacgacctgacagccaagaggctcctacatgtgaagggtcgtagagtggtgagagccacagaagttccccttagctgggacagtttcaacaagggtgactgcttcatcattgaccttggcaccgaaatttatcagtggtgtggttcctcgtgcaacaaatatgaacgtctgaaggcaaaccaggtagctactggcattcggtacaatgaaaggaaaggaaggtctgaactaattgtcgtggaagaaggaagtgaaccctcagaacttataaaggtcttaggggaaaagccagagcttccagatggaggtgatgatgatgacattatagcagacataagtaacaggaaaatggctaaactatacatggtttcagatgcaagtggctccatgagagtgactgtggtggcagaagaaaaccccttctcaatggcaatgctgctgtctgaagaatgctttattttggaccacggggctgccaaacaaattttcgtatggaaaggtaaagatgctaatccccaagagaggaaggctgcaatgaagacagctgaagaatttctacagcaaatgaattattccaagaatacccaaattcaagttcttccagaaggaggtgaaacaccaatcttcaaacagttttttaaggactggagagataaagatcagagtgatggcttcgggaaagtttatgtcacagagaaagtggctcaaataaaacaaattccctttgatgcctcaaaattacacagttctccgcagatggcagcccagcacaatatggtggatgatggttctggcaaagtggagatttggcgtgtagaaaacaatggtaggatccaagttgaccaaaactcatatggtgaattctatggtggtgactgctacatcatactctacacctatcccagaggacagattatctacacgtggcaaggagcaaatgccacacgagatgagctgacaacatctgcgttcctgactgttcagttggatcggtcccttggaggacaggctgtgcagatccgagtctcccaaggcaaagagcctgttcacctactgagtttgttcaaagacaaaccgctcattatttacaagaatggaacatcaaagaaaggaggtcaggcacctgctccccctacacgcctctttcaagtccggagaaacctggcatctatcaccagaattgtggaggttgatgttgatgcaaattcactgaattctaacgatgtttttgtcctgaaactgccacaaaatagtggctacatctgggtaggaaaaggtgctagccaggaggaggagaaaggagcagagtatgtagcaagtgtcctaaagtgcaaaaccttaaggatccaagaaggcgaggagccagaggagttctggaattcccttggagggaaaaaagactaccagacctcaccactactggaaacccaggctgaagaccatccacctcggctttacggctgctctaacaaaactggaagatttgttattgaagagattccaggagagttcacccaggatgatttagctgaagatgatgtcatgttactagatgcttgggaacagatatttatttggattggcaaagatgctaatgaagttgagaaaaaagaatctctgaagtctgccaaaatgtaccttgagacagacccttctggaagagacaagaggacaccaattgtcatcataaaacagggccatgagccacccacattcacaggctggttcctgggctgggattccagcaagtggtaaattggtatttgtaaaaagcaaacaaacattacaaggcagttatctcattgctgttttgggagaggaacgggaaaagctttttgcttatttgtcttttgaaaattaaggctgggcgcggtggctcacacctgtaatcccagcactttgagaggatgaggtaggcggatcactggggtcaggatttcgagaccagcctggccaacatggcgaaacctcgcctctactaaaaatacaaaaaaattagctgcgcgtggtggtgcacgcctgtagtccctgctacttggaaggctgagacaggaaaattgcttgaacccaggaggctgaggttgcagtgagccaggattgcgccaccacactccagcctgggcaacagagactctgtctcaaaaaaaaaaaaaaaaaaaattaacctcaaccaaacgcctattttttaatgcttagttttggcttgaaattcttcttcacctggagttttcttacgttaatacattaaaataacctgaaggaaactttcgttatgggccaatattagctcttatggaaactgatttatatcttttttatgacctttcaaaagtaaaatactatgcataatctagaaagatttgtcagataggaaattttataatgcattagccattagtcagagttgttttttaacatgccagagaaaaagttgtaatgccttggaagttattctcttttctatagattgtgttcaaaagatgtgtatacttgcaataaggtttatgttaaggtggctttaacaattggttgctattttccttctttagtcaatatgactttgatgtcattaactgctaagtgttattttctaagaggaattttatcttttttttaaccttattaaaagcctttgaaaacacaaaaaaaaaaaaaaaa

SEQ ID NO: 364 - protein, 715 aa, Homo Sapiens
MARELYHEEFARAGKQAGLQVWRIEKLELVPVPQSAHGDFYVGDAYLVLHTAKTSRGFTYHLHFWLGKECSQDESTAAAIFTVQMDDYLGGKPVQNRELQGYESNDFVSYFKGGLKYKAGGVASGLNHVLTNDLTAKRLLHVKGRRVVRATEVPLSWDSFNKGDCFIIDLGTEIYQWCGSSCNKYERLKANQVATGIRYNERKGRSELIVVEEGSEPSELIKVLGEKPELPDGGDDDDIIADISNRKMAKLYMVSDASGSMRVTVVAEENPFSMAMLLSEECFILDHGAAKQIFVWKGKDANPQERKAAMKTAEEFLQQMNYSKNTQIQVLPEGGETPIFKQFFKDWRDKDQSDGFGKVYVTEKVAQIKQIPFDASKLHSSPQMAAQHNMVDDGSGKVEIWRVENNGRIQVDQNSYGEFYGGDCYIILYTYPRGQIIYTWQGANATRDELTTSAFLTVQLDRSLGGQAVQIRVSQGKEPVHLLSLFKDKPLIIYKNGTSKKGGQAPAPPTRLFQVRRNLASITRIVEVDVDANSLNSNDVFVLKLPQNSGYIWVGKGASQEEEKGAEYVASVLKCKTLRIQEGEEPEEFWNSLGGKKDYQTSPLLETQAEDHPPRLYGCSNKTGRFVIEEIPGEFTQDDLAEDDVMLLDAWEQIFIWIGKDANEVEKKESLKSAKMYLETDPSGRDKRTPIVIIKQGHEPPTFTGWFLGWDSSKW

SEQ ID NO: 365 - DNA, 1695 bp, Homo Sapiens
gaggcacagataaagataagttttactgtcatgctgcttttaacataacagagcaacatcacctaggaaaaaagtttgtaggaggatttttaatccatatatttgtcttatggctagataaagatttctctgaaaaaaagaagcatgtcaggaatctctgggtgcccctttttcctctggggacttctagcattgttgggcttggctttggttatatcactgatcttcaatatttcccactatgtggaaaagcaacgacaagataaaatgtacagctactccagtgaccacaccagggttgatgagtattatattgaagacacaccaatttatggtaacttagatgatatgatttcagaaccaatggatgaaaattgctatgaacaaatgaaagcccgaccagagaaatctgtaaataagatgcaggaagccaccccatctgcacaggcaaccaatgaaacacagatgtgctacgcctcacttgatcacagcgttaaggggaagcgtagaaagcccaggaaacagaatactcatttctcagacaaggatggagatgagcaactacatgcaatagatgccagcgtttctaagaccaccttagtagacagtttctccccagaaagccaggcagtagaggaaaacattcatgatgatcccatcagactgtttggattgatccgtgctaagagagaacctataaactagctggaccatgatctagttcaatgatttggctcctattgaagatggcttctaagaaaacaagatgcacagaggacacagaaggacttggcagcagggtgatgacctgatcatttgttgatgggatggtggcttacctcttattcacagcttacacttatgcatgccaaatgtaaggccatgaaaatcagtatttcaaataacttaaaaaatgctttactactaaaatgtaaaaaattaatgtgctcacctcggcagcacatatactaaaaattaataagacccagcttgaaaattgagcctgataacaagattacaaattcacaatacctaatacttagggaaatataaaaatttaagcatgaatgcgttctggaacacgttagaagaaaaataaaagccaatgagtttttttttaattctcctttctcaccaatgggcaatagcccataattgaaataaatttctgattgaaaggtataggaaacattaaaatgcattactaagagaagtaatataattttcttacaaagtatttttcccaaagatagctttactatttcaaaaattgtcaaattaatgcatgctccttacaacaaacaaatatcaaaaagagtttaggaattctactagccagagatagtcacttggagaaactttctatatatccttctaaatatttttctgggcatgcttatgtatgtacatcagttgtttctttttattttgaaccaaaaatgtggtttcttttgtacacattacttaaactttctttccagtcaacaatatattgtggatttattttcactgttatatttaactatatataaatacgcatatattgtaattttaatgtctgcttagcaccccactgataaccaaatcacagtttatttaaataattttaatgacttttcaaaaacaatttattgatgcaaaaagcaaggttgagatgacaatgtttctttcaataattaaaaaatactgcttcac

SEQ ID NO: 366 - protein, 186 aa, Homo Sapiens
MSGISGCPFFLWGLLALLGLALVISLIFNISHYVEKQRQDKMYSYSSDHTRVDEYYIEDTPIYGNLDDMISEPMDENCYEQMKARPEKSVNKMQEATPSAQATNETQMCYASLDHSVKGKRRKPRKQNTHFSDKDGDEQLHAIDASVSKTTLVDSFSPESQAVEENIHDDPIRLFGLIRAKREPIN

SEQ ID NO: 367 - DNA, 8058 bp, Homo Sapiens
agtcatcttcaactcggcaggaacccacaagtgtgcatgtgtggctcggaggcttcagctggggccccgccctcgtccccaggcgcacactgacacacgcagcccagacccggcccgagcgggctcctgccctcggcgtggcttctctccagccgggagtcccagggccagctagcctcctcccctaaaggggacggcctgtcagcgcagtgccagagtccagcaccgggaggaaagtttcggagtgcggagggagttggggccgccggaggagaagagtctccactcctagtttgttctgccgtcgccgcgtcccagggaccccttgtcccgaagcgcacggcagcgggggggacttcagccctccaggcggggtgggttccaggtccgggtccgaggcgggcgctggaggctcggccccaggccggagaggaactcctttcgcgagctgtcgccgtgggcccgcattgtctgcaggaactctccggaatcgggagggggaggactggatcgcgcttccactgggattcgtcaagagttccggcggcagctgcggcggtggcggagactccctttgtcctctcaggacctccctctctccctccctgtcagctggtgggtcccgctgccgcaggcgccggcgtctcagctgctcgccgccccccaccccagagtgcgtgccgggtgactcccgccacctttgcgaccctcctgagcttaggggactgcgagcgggagggagtctcaggcccccggccgcaggatggtggcggagcggtccccggcccgcagccccgggagctggctgttccccgggctgtggctgttggtgctcagcggtcccggggggctgctgcgcgcccaggagcagccctcctgcagaagagcctttgatctctacttcgtcctggacaagtctgggagtgtggcaaataactggattgaaatttataatttcgtacagcaacttgcggagagatttgtgagccctgaaatgagattatctttcattgtgttttcttctcaagcaactattattttgccattaactggagacagaggcaaaatcagtaaaggcttggaggatttaaaacgtgttagtccagtaggagagacatatatccatgaaggactaaagctagcgaatgaacaaattcagaaagcaggaggcttgaaaacctccagtatcataattgctctgacagatggcaagttggacggtctggtgccatcatatgcagagaaagaggcaaagatatccaggtcacttggggctagtgtttattgtgttggtgtccttgattttgaacaagcacagcttgaaagaattgctgattccaaggagcaagttttccctgtcaaaggtggatttcaggctcttaaaggaataattaattctatactagctcagtcatgtactgaaatcctagaattgcagccctcaagtgtctgtgtgggggaggaatttcagattgtcttaagtggaagaggattcatgctgggcagtcggaatggcagtgttctctgcacttacactgtaaatgaaacatatacaacgagtgtaaaaccagtaagtgtacagcttaattctatgctttgtcctgcacctatcctgaataaagctggagaaactcttgatgtttcagtgagctttaatggaggaaaatctgtcatttcaggatcattaattgtcacagccacagaatgttctaacgggatcgcagccatcattgttattttggtgttactgctactcctggggatcggtttgatgtggtggttttggcccctttgctgcaaagtggttattaaggatcctccaccaccacccgcccctgcaccaaaagaggaggaagaagaacctttgcctactaaaaagtggccaactgtggatgcttcctattatggtggtcgaggggttggaggaattaaaagaatggaggttcgttggggtgataaaggatctactgaggaaggtgcaaggctagagaaagccaaaaatgctgtggtgaagattcctgaagaaacagaggaacccatcaggcctagaccacctcgacccaaacccacacaccagcctcctcagacaaaatggtacaccccaattaagggtcgtcttgatgctctctgggctttgttgaggcggcagtatgaccgggtttctttgatgcgacctcaggaaggagatgagggccggtgcataaacttctcccgagttccatctcagtaaaagggaagcaggaagaccaagaaggtacgaagatggcacattttcacatagctgattttcaaccaaatgaaaaaaatcaagtgcatttcagaagcttttggaagagcagcttaattcctctcagtcgggaaatgttttctctgccttctgctttgcttgcaccaaacatttctaaacacttgttctgccatctacatgggaggtgatgaaactcagtggtaactcatgatttatgacattgaaaataaagaggaacattgacctgcagactatggtttgtacaagaaagtttgtttgaatgtgtagaagaggaaaaagcaacaacagcaacaacacgaagatgataccaaaacaaggaccacaaaacaactagccatgatgggagacaggagttttttacatggaaacatggcacttgtgtttttatgtggcaagatctttatccataggcagagtatgaaatttcccaccaggctaagcaaataaagaagtccattgccttatagctatgtcagatcacagaatccttccaagtgctctatcacagtgtgccttatgggaagtttctgactggaaaatcttgtcattctaacactgaaaagtgcacacgcatgacaaaatgtagacaagatgcctcaaggtattggtagcaagcaagattttgccctttagttttcgaagacacctttctttcattatgcactcgggacaagaaaattaatagagcgttattccacagaaggcctctagccagagatcttgagtgtagtgcaagggactcattttttgcgaacttgtccctgtgactagtagattcccccttttcctgtgtttaggatttagtagtgcataaagcattaatatccataaacatacctagaagtttgttttgcttttaatttaaaggaagcagtaaccacaaagcttccgctcagggttttttctttcttcaagtctccaagggctcttcagcgtcacaagccagcaactctctttgcattaaaatttcaaagtttaattaatataattaaaagcaacagcaagcagcagcctgtgaagattttgctcatcttttttatgccttttgacattgaatgacctattactgtatgcgcattacttggattttgaggggcactctaccttggttatgattcagtagaggaaaaagaccacctttcttcaatttacaaattaaatcttctggagggtcgctatcacaaaacattgacgatgtatgtattataattttttagaaaaaccaccatcgtgtcacgtcgacgatgccaaattatgttagcgtgagcagaaacaccgtgggggaggaaggcagcagctgaagaaaaaagctcaaatgatctagtcactttcgatactgtacttcagatgcgaaatggatattcgagtggaaacctgacaaagtgcgcctgctttgatgtgaactggtatagacaatgaccagtggctgggtcagtgggatgtctctctgtgagcacaaaggcttatcaaatgacactaaaaataagttcaacaaccatcacattggaagggagaaggcgaacatttcatgtttggcgggcatgtgagtgcacaagatggaaagagcgattggagcatcctggtataattacccccattgtgctcttaatggaaatttcaaaggacgggagtattctgttggttggtgtccaggtttgtggcactgttccaagaggccttacacacacacacaaatatataattttctatacatatatatcctctagcttgaaacttttgctcaagtttatttatgtcactggctggctggatccaaagtcatgtgtccacacattcataaataaaaattttacctatgcctgtgctaccatttctttaagcccacataaagctaatgccttcttgggttgaatatgcagttgttatgcttagtttcagggatggaattctattcagttccaaaatgtccctcatgttcacagatgatactattggcagtagctgcatatgcaagtgtaacttggaagcctgatatagtatacccaaccctttctgcaatgagttattgtatccctttgttctgcatttgcatctggaacaagacctaatgtggcttccttaaatgggcacttcatttctgatgagtgcacaccaattattgctattttaatatcattgagaatactacagaagctaaggctatgtttctttggtaactacttcaaatttctctagaattatgtagcatacttacattttgctgcatgaacaatgaaaattaacctctgcctttaaatggaaaaataactttctgtagattgttatacagctactatgaagagctcttaatgaagaggaagtggcagtggtctatatgtagactgaaaaaatatcattaataaagttcaaagactgatggaatttcattgcccttaaagatatgaaccagatctgttttatgcttttctccaattatactaactagcagttgaaaagaatttgttttgaagagtgttattttcttaccaaaagaccagatcaaaaatccctatacttttccaccaaaaaaagattaaaatgaagccatttctataaatttaatggcactttatattttatatagagaaatagcttctgtttgattttctggacaccatgtcagtcaagatctactttctgtgtaaaaatgaataagtcttgcacataatccattcgtgttgcataaggttgcaaaaacaattaagtgggaaatgactcctaacttatgtgtctactctgcctagaaagaaagttttgaaggcatctatatatatttcataacaatgtctgttctttatggatttgatccataaatatttatctatctgaaaactttgatacttggaatgttttccttagagcatttggtgctccaagaaaaaacatttggtgctaagagttgcagcactgatgcctttccctaagttaattctattttaaaaatttatatttccttcccaatgagatgcagagtaaaatttgagaccctccattgactagggagcagcatctgtcatctatggttaattactattttgacaaaaatatagaaggtttaaacccccatgtatttcagattgttagagaaagaagtagtttgcttatatttcccttgaactttattctaaccatttaaataataaattattcaatatttgttataataaatccttactagatacaagatttgggtgtttctgtgaagttaactttattatctaaatatcactaaccattgtttactgctcagaggcagatacatttgtttagtttaaagttgaaacaaattctatattgtggataattaggtgtttaaaacattttgatagaccagcttatatatgttatttttgaaatttaagaaggcagaatgtaattaggtcacatttacaagtagaaggaattataacttcctactccatgcatatattgtatattggttagcttttactagcattttctagcatcacattactttagaaagtttttgagagtttcattactactggaaaagtttggtgggtatatgtacacaggaaagaaatatatgcatcatttcaatatgaaaggaaatacataatctagaaacatagaataactcttggtacatctgttacatagttaaggaaagaaacaggcaggtgaggctggagaatgttgtctatttgtaggaaataaagtcagtgcagacgcatattctagtttagagttagattaatattgtgcttagtgaatttctatgacatatttctgagaacactttaatatatttccacacctactggaatctaattcagtcgatcggataaaagaaagacttttttgttgttgtttttgaaaatccataatgtagcaggttctgcgctggttttttaatgtattttatttttgtgctctcctgccaaaagaaaaggctgataagtaagtacacagtacaacatgtaaatttgtataaaaatatgcttgtttagattgctctacaataactatattaaggtaaattgtgtgtgtgtgtgtgagagagagagagagagagagaaacagagggagaattgactcaatgtgttttctatgaagagtcttagcttaggaatcaggtaacagagaggtcctagaccatagacccagccatcaactagcttgctgatgttgaacagatcaactctcaaccatagactgaagatggaatgaagatatcaaaagttccttttagcactgactagattttttttcttttttttgaaacagagtctcactctgtcacccaggctggagttcaatggcatggtctgggctgactgtaacctcctcttcctgggttcaagtgattctcatccctcagcctcctgagtagctgggattacaggcacataacaccacacccagctaactcttgtatttttgtagaaatggggtttcgctatgttgctcagactggtctcaaacacctggcctcaagtgatcctcctgcctcagtctcccaaatgctgtgattacaggcacaagctactgcaccaggcctctgactacatttctattaatatggttaggttggaggttttagtatttttgtatctcatatttgtatcaatatgactggcttctttgtctgtagtgtgtggtaatattagttctgtaaactgtcagttgcaaaaaaaaaaaataccttgaactatagtatatgttgataattagccataataatttcttagttaatttcttataattaaatttgtcaaagaggaaacttacagtttatatctgatgaaatctctaaaaagatgggtaaaacattgggaaatgtatgcatgtacttcactctggtttcatagggttagcaagtgtcttaaaaacatatataaagaagcacagagattgttaggagatatttatgctcccagttttaataattgggatactttgtataccacagaaagaaaaattactaaactcctctttttttagtcaaaattggaaaaaaagtcttaattgacagttactatgcctgtgctacccatagcaagtattcagtggaaaatactttactaagtaagtaatttgaacacagcttaaaatccatagtatgttacaattgctagcctttcacaaagtttgcattgtcttaatgtagaaggatactgtgatctaagaattcacaattttaaaaagtggaacctaaatagggtttcctaattgccatgaagttatttgtatcttagatgaattatatttacaacattgtaaatgtcagtgggtgatccaaaataaattgttaaagttattaaaatgtacatttaagtaggtttcagtttgactagaaataattggcaagaaggcaagaactagtcttctagagcagggatcccatcccccaggtcatggactggtactggtccatggcctgttagaaaccaggccacacagcaggagatgagtggaaagcaagtgaaacttcatgggtatttacagcaattccccgtcgctcgcattaccacctgagctgtgtctcctgtgagatcagcagcagcattagattctcaaggagcacaaacccttttggaactgtgtgtgagggatctaagttgcgcatttcttatgagaatctaatacctgatgatctgttgttgtctcccaccacccccagatgggaccatctagttgcaggaaaacaagctcaggctcccactgattctacattatagtgagttgtgtaattatttcattatatataacaatgtaataataatagaaataaagtacataataaatgtaaaaaaaaaaaaaaaaaa

SEQ ID NO: 368 - protein, 488 aa, Homo Sapiens
MVAERSPARSPGSWLFPGLWLLVLSGPGGLLRAQEQPSCRRAFDLYFVLDKSGSVANNWIEIYNFVQQLAERFVSPEMRLSFIVFSSQATIILPLTGDRGKISKGLEDLKRVSPVGETYIHEGLKLANEQIQKAGGLKTSSIIIALTDGKLDGLVPSYAEKEAKISRSLGASVYCVGVLDFEQAQLERIADSKEQVFPVKGGFQALKGIINSILAQSCTEILELQPSSVCVGEEFQIVLSGRGFMLGSRNGSVLCTYTVNETYTTSVKPVSVQLNSMLCPAPILNKAGETLDVSVSFNGGKSVISGSLIVTATECSNGIAAIIVILVLLLLLGIGLMWWFWPLCCKVVIKDPPPPPAPAPKEEEEEPLPTKKWPTVDASYYGGRGVGGIKRMEVRWGDKGSTEEGARLEKAKNAVVKIPEETEEPIRPRPPRPKPTHQPPQTKWYTPIKGRLDALWALLRRQYDRVSLMRPQEGDEGRCINFSRVPSQ

SEQ ID NO: 369 - DNA, 674 bp, Homo Sapiens
acaggacacagctaggttctgaagcttctgagttctgcagcctcacctctgagaaaacctctttgccaccaataccatgaagctctgcgtgactgtcctgtctctcctcgtgctagtagctgccttctgctctctagcactctcagcaccaatgggctcagaccctcccaccgcctgctgcttttcttacaccgcgaggaagcttcctcgcaactttgtggtagattactatgagaccagcagcctctgctcccagccagctgtggtattccaaaccaaaagaggcaagcaagtctgcgctgaccccagtgagtcctgggtccaggagtacgtgtatgacctggaactgaactgagctgctcagagacaggaagtcttcagggaaggtcacctgagcctggatgcttctccatgagccgcatctcctccatactcaggactcctctccgcagttcctgtctcttctcttaatgtaatctcttttatgtgctgtattattgtattaggtgttatttccattatttatattagtttagccaaaggataagtgtcccctatggggatggtccactctcactctttctctgctgttgcaaatacatggataacaccgttaattccatgtgttttcataataaaactttaaaataaaatgcaaaaaaaaaaaaaaaaaa

SEQ ID NO: 370 - protein, 92 aa, Homo Sapiens
MKLCVTVLSLLVLVAAFCSLALSAPMGSDPPTACCFSYTARKLPRNFVVDYYETSSLCSQPAVVFQTKRGKQVCADPSESWVQEYVYDLELN

SEQ ID NO: 371 - DNA, 4584 bp, Homo Sapiens
tcccacgaccttggccggcgccggggccctacacgccagacctggctcggggtgggagtgcagaggcaaccaaaaaggaacccacacctccctccagggcccggggcgctgtcagacggggcagcaaccaggagattccctgggcctgcaggaagcccttccgcggaccgaaagattgttccccattttggagatgaagaaactgagactcaaagcagctgagtgaccttcccaaggacacacactgaactgggcggtgatcaggatctgaatgcacagggcgggtgttcagcgattgtttactacgttgaacgtgacctccaggaaagcagttctggccgagatcccctgacaacgcaaagcaagaagtaacgtggaaggaggctccccaagctggctggccattttgctgctgtgtgtggaggtgctgccagtggcatgcccaaacccaaagctggaagaggaataaattacaagtggtcaaggttgcatccttttgagcccaggacctgcttgtaagccgagagggttctctggccctaatctagccaagcaccatggagagaatcagtgccttcttcagctctatctgggacaccatcttgaccaaacaccaagaaggcatctacaacaccatctgcctgggagtcctcctgggcctgccactcttggtgatcatcacactcctcttcatctgttgccattgctgctggagcccaccaggcaagaggggccagcagccagagaagaacaagaagaagaagaagaagaagaagaagaaggatgaagaagacctctggatctctgctcaacccaagcttctccagatggagaagagaccatcactgcctgtttagttaggcaggaagcagaggtgtttcctttctggggctaagcctccttctgaccacacacagacatttcaggaacccctgaaataatgcactatgtccatgtccacagagtaactactcaaccaaggaacaaacctcagactaagtgtcccagtggagggcagtcccagggaccacgtggacaattcttggatactgtcttggcagctatgtgtccaatagcaatgctccttactgcagacccaggcatgcctcccacctgtctctggcataccccacatgcaaagcacaaagaacatttatccatacatctcaatatggttcccaagtgtgtgcacatgcacgtaacacacacacacacaaattcaggtagcaggtacgtgggcaagtatattctgctcatcaaatggtcattggctatgtactttgtgcagggaagtacattatctacagtcacaaaaatgtctcatgggaaagccttgccagattcagacacatatatacaatttcctaaccagcaaggcccccatacaccatctattccataaaccactcaggttacagatgcatgctttcctatttctaactctacacataaacttttactggaagtactcataattggacattccagcaacctgctacagtccccacccttgtgtgtcttgatacagacacaccaagtttctgtgcctctgacccctcacctgtgccaagatgtttaaagtgtgatggttcaaaattcattgaaagctcttttcttgtaactcatgacaaagtccgtcctcattgccactgagaggtgtttaatgtgatccaagacctctctgtgaaacattacccccgcaaaccactcagcaaagtgcctttctccaagcaagaacaaagagctcttggtggtgactgctagaaaattatggaagcccactcatttatgtcagtggactgcaactgtgtacctgtgcaatgtttacagatggaaagggtgaggagatgctacacctgagctaggtatctcctatataaccaaagtttccagcagggaaggaactagacaatcatcagtgcagtctcacagaaggcaacactggaagtgatgtcataaggttgtgatgtgtgcacggtatggcacaggtgggatgcagaggtaacagagtttaaatgaaagtaggatgaagctataaagaggtttatttatatttatattgaagctcaggcaagtgccttgcacacagtaggtacttataactaactgtggttactgttggatatgtgatgttgttaagggtaagcttgtaatacctcaccagttctccccgagtgatcttctcttctaagtgagcccactaattgctgcaatggatgaaattgggtgtttaatgctggagagcacatgtaggtgacacatgtgccttgaggtatgtgaggacatgtaaattagatccacagtgagctgaggagggctttccccgccagagtgaggttgggaagcagagttaatccacttataggatgaactgcttggtatttttattgtattgtgactgtattacaaagatggacaattcactccttgggagcaagttatgctctagaagtttatttacaaatatgctgggcagctctcttgaaatattttcccaaggaagctattctacacagtggcaaaattgctatctaattaataatgtagctaaactatgatatttatagtagcaaaaaactaaattctataagattgcattaaaggaaagatatattctatttgctcacttgggctgcttggtactcacctgccctccaggtgtactttaggcctgtggagggtgggcatttagtggtgacccttgcaccagggttttctaacagatgaccctgtgaatcataatttaaacctgcatatattttatagccagtcacatttgccctctcaccctatatggccataaactgcctaagcactcaggcctcccactcatcaacccctttgaccagagaaagaagcactctggttctctatccccttgtcacatagagagtttgtcatggggcctctggctgtgcccttcacataacagaatgacttgccatctgcctgcaccaaacccagggatgtggaagacatctccccacaactgccactgctcaccaggacaagctgcccttcctgtctccacctctcagtccccctagaatggatggctggggagaggtggaggctgacagctgagacgtagtgtcagatatgatctaggagggcggatcaccgggatccgggaccatacaagtaacatggtttccatggcaactgcttgctcctttgaattaagacagcagtcagttgtcattgccatgacaaggcctctatctccaggcacaatgtccctgctgtctcctaatccaatggacttgctctcaccccagggatgaaacacccagaaactcacttctcagtcacttccacagccgatgactcagaagagccaaacccagaatggggcctctcttttccccatcacagactcccctgacaacctttcctggcgtaactagaggagtcccagtgcaggataggccctaaacgttttgttaaataaacaggtgcatgaaaggagcctaaggccattgttgatatccactctcttctttccacttccttctcatctttttctccatgttttatgcttctctgattccctcttctgcctgcaccagaccagccccagccctttattcctctccattttcactccttccagcctctgtccctgaactgccactggcaacccatgggacctcaggaccagagactgcttgactcatctggggagggtaagttcacgggggacaaaaaaatgattcctaaagaagaggcttcctagaccagcacaggctcgagaaagacatcccctaggcctggacttctgagcagctttagccaggctccggacggcagccagaggaggcctttccccattgctcctttccccattgctcaatggattccatgtttctttttcttggggggagcagggagggagaaaggtagaaaaatggcagccacctttccaagaaaaatataaagggtccaagctgtatagtatttgtcagtatttttttctgtaaaattcaaacacacacaaaagaaaaatttatttaaataaaatactttgaaaatgaaaagtcttgatgtagtcagatggttactctcttaacattaggtattacccccactcagacatcactcagaaatgatcaatgcagggactctttctgtgacacaaatgtcccagccctccctggtcaccgccttcgccatggtagagtcataggtctgaggatgaggaatgtggctgtctcacccttgcttgcaaaacagatggccttggagaccagactccctcaaaggtgccagctacaggaaaaatatactgatgttccttggcaacacttacagaactttccatcaatgaggtccatcaatggcttcttaaaggaaaaggggggaaatagcaaaaacctaaggaagaatggacctttgagttaaatccagtgtttgttgggaaaggagggatcaaaaacctctatagtagccactagggcaaaaactgtgtgtatgtgtgtgtgtaagtgtgtgtacactgttcaatatggttcaatatggtaccaatagccacatgtgactatttaaattcattgcaatgaaataaaattaaaggtatactagctc

SEQ ID NO: 372 - protein, 107 aa, Homo Sapiens
SEQIDNNMMERISAFFSSIWDTILTKHQEGIYNTICLGVLLGLPLLVIITLLFICCHCCWSPPGKRGQQPEKNKKKKKKKKKKDEEDLWISAQPKLLQMEKRPSLPV

SEQ ID NO: 373 - DNA, 5182 bp, Homo Sapiens
cgcgctggcgccatggcggagcaggagagcctggaattcggcaaggcagacttcgtgctgatggacaccgtctccatgcccgagttcatggccaacctcaggctcagatttgaaaaagggcgcatctatacgttcattggagaagtcgtcgtttctgtgaacccttacaagttgttgaacatctatggaagagacacaattgagcagtataaaggccgtgagctgtatgagagaccgcctcacctttttgctattgcggatgctgcttacaaggctatgaagaggcgatcaaaagacacttgtattgtgatatcaggggaaagtggagctggtaaaacggaagccagtaagtacattatgcagtatattgcggccatcaccaaccccagtcagagagcagaggttgaaagagtgaagaatatgttgcttaagtccaactgtgttttggaagcttttggaaatgccaaaaccaaccgtaatgacaactcaagcaggtttggaaaatacatggatatcaactttgacttcaagggtgaccctattggtgggcatatcaataactacttactagaaaagtctcgagtgattgtgcaacagccaggagaaagaagctttcattctttctatcagctactccaaggaggttcagaacaaatgctacgctctctacatctccagaaatccctttcatcctacaactatattcatgtgggagctcaattaaagtcttctatcaatgatgctgccgaattcagagttgttgctgatgccatgaaagtcattggcttcaaacctgaggagatccaaacagtgtataagattttggctgctattctgcacttgggaaatttaaaatttgtagtagatggtgacacgcctcttattgagaatggcaaagtagtatctatcatagcagaattgctctctactaagacagatatggttgagaaagcccttctttaccggactgtggccacaggccgtgacatcattgacaagcagcacacagaacaagaggccagctacggcagagacgcctttgccaaggcaatatatgagcgccttttttgttggatcgttactcgcatcaatgatattattgaggtcaagaactatgacaccacaatccatgggaaaaacactgttattggtgtcttggatatctatggctttgaaatcttcgacaacaacagttttgaacaattctgtatcaattactgcaatgagaaactgcagcagctatttattcagctggttctgaagcaagaacaagaggaataccagcgggaagggatcccctggaaacatattgactacttcaacaatcagatcattgttgacctcgtggagcaacagcacaaagggatcattgcaatccttgatgatgcttgcatgaatgtcggcaaagtcaccgatgaaatgtttcttgaagcacttaacagtaaattgggcaaacacgcccatttttccagccgaaagctctgtgcctcagacaaaattctggagtttgatcgagattttcgaattcgacattatgcaggcgatgtagtctattctgtcattggttttattgacaaaaataaagatactttatttcaagatttcaagcgccttatgtataacagttcaaatcctgtgctcaagaatatgtggcctgaaggcaaactgagcattacagaggtgaccaagcgacctctgactgctgctaccttgtttaagaattctatgattgctctagtagacaaccttgcatcaaaggaaccatattacgttcgttgcatcaaacccaatgacaagaaatctccacagatatttgatgatgaacgctgccggcaccaagtagaatatcttggactactggaaaatgtgagagtgcgtcgggcaggatttgccttccgccagacatacgagaagtttcttcacaggtataagatgatctctgaattcacctggcccaaccatgaccttccttcagacaaagaggctgtcaagaaactaattgaacggtgtggttttcaggatgatgtagcttatgggaagaccaaaattttcattcgaacaccccgaacattgtttaccttggaagaactccgtgcccagatgctcataaggattgtcctctttctacaaaaggtgtggcggggcaccctggcccgcatgcggtacaaaagaaccaaggcagctctgacaataatcaggtactaccggcgctacaaagtgaagtcgtacatccacgaggtggccagacgcttccatggcgtcaagaccatgcgagactacgggaagcacgtgaagtggccaagccctcctaaagttcttcgccgttttgaggaggccctgcagacgattttcaatagatggagagcatcccagctcatcaagagcattccggcctcagacctgccccaggtcagggcaaaggttgcagccgtggaaatgttgaagggtcaaagggctgacctcgggctccagagggcctgggagggcaactatcttgcttcaaagccagatacacctcagacctcaggcacttttgtccctgttgctaatgaattgaaacggaaggacaaatacatgaatgtcctcttttcctgtcacgtccgtaaggtaaatcgatttagtaaggtggaagacagagcaatttttgtcactgaccgtcacctgtataaaatggatcccactaaacagtacaaggtgatgaagactatccctctatacaatttgactggtctgagtgtctccaatggaaaggaccaacttgtagtgttccatacgaaagacaacaaagacctcattgtctgcctcttcagcaaacagccaacccatgagagtcgaattggagaacttgttggagtgctggtgaatcatttcaagagtgagaagcgccaccttcaagtgaacgtcaccaacccagtacagtgcagcctgcacgggaagaagtgcaccgtctccgtggagacgcggctcaaccagccccagcccgacttcaccaagaatcgctcgggcttcatcctcagcgtgcccgggaactgacgccccgcggaggcctggcccggagcccggccacactccgagtcctgggtcccagtccagctgctgcctcccaacccatgcccgctagaaacctgctgcgagggcccctcccagaggagccccgcccctgtaagatttccttcctggttttctgcctttggtatcatcttcctctgtccttactgtccacggtccctgttcaataagccaaagaccctggtgccccgcccagacccctgggctgacgtccagaccaatctcaccccagaggcaactggatggtgcctttagttggtgcggatgccccgtggccaggtcaagtcagagcacctggacaggtgtcctccctgctgctgaccctgcagagggaaggggtggggatgcaggaccccgctctgcgggagccccatagccacctctcttgcccaaggtgagccagccctggggacccagctcagggaggctctgctcagagttcggcggacccaccccaacccaactcccagccgccagccaaagccactgggtgagcagagtcacccacagggccagcccctcagccaggagccagtggcaggagcggaacagcccatccagcagagtgagtccatccttcccaggttctcccctgggagactccctttgccaccaaggcccccaccagggcctctgaccaccgctctggagaggacagtgtggcatgctccaaggatcatcttacttaactcgcagcctgtggctgtggtcctcttatagatactttcaccgtttgcagggttgctaatcagatacctgctgtcaccacacttgggtcaggaaccctaatgagaacggggagctgccagggtgagggcagccctcagggtcggccgctttccctctggaccacctcccgctgcgtttcctactcagagaaacagcaagggcggggtcaagacacgggatgacgggaagcaggaagcggggcagcagcacagcgtggggtcctggcactgcaggccaggccaggatgcccaccccgccctctacacggccccttggggcctgcgcccgtgaaactggtgccagggagcactgccagcttgccagtttctgcccagcaaaagcacgtatgcttcaggggccttctgagaccaccttccccactgagccccagctgctgagaaggccttgagggaagtagaggctgggagcaaatgccccatgcggtgagaggatgaggggagcctacgcctcaggcatgtggtgagaggatgagggggagggagcccacgcctcaggtggagtgggcagaggtgcaagagagggatgtactgaagcttcttcccgtcctgccacagacacttctcctgccttcccaccctgacccggcagaacccaccaagtgcctgtgtgcagcctcctgtgcctcacccagggcctgaccccagagtggtcccaacaacccggtctcatgcccactccccatccctgcttcccaaaaattgcactgtgtgcagtttgcaacaaagaatcccgctggcatcctgtccttgggaaccctttctcattctccaagcctggtcagctgcctgcacaggcagaggtgccctcagcccaggttagcaacactcatagttttgccaattaccagtagacactagtggaaccatctaactggaacttcctctctccttccacttatttcctcaaacttgttgctttacactagacacatgcaaatgtatgttttaaacacaccaaaacagatcatgccaaatgagttgcctgtcaaaggctggagggcaggaggagggcctgggtttgggttctttcctcccagcctttggatggtgccttgggccccttagccccagcgccagggcctcccagctgaggccacaggacaagcacttttttatgatgtactaaaagccacagtatgtggcaactgcaaaaggatcaggaatttagggtatgatctcggtcacgtgtcccgggcgctgaggggaaaggaagcgggcatgattgtagacaatgagggggttctcttgatgtaatgaaatgcaattttatggtttggtgcaaaaactcctattttccagtaaattaactttatttctaaagcatattttgatttgccatcaagagcaataaagcattaaatctt

SEQ ID NO: 374 - protein, 1006 aa, Homo Sapiens
MAEQESLEFGKADFVLMDTVSMPEFMANLRLRFEKGRIYTFIGEVVVSVNPYKLLNIYGRDTIEQYKGRELYERPPHLFAIADAAYKAMKRRSKDTCIVISGESGAGKTEASKYIMQYIAAITNPSQRAEVERVKNMLLKSNCVLEAFGNAKTNRNDNSSRFGKYMDINFDFKGDPIGGHINNYLLEKSRVIVQQPGERSFHSFYQLLQGGSEQMLRSLHLQKSLSSYNYIHVGAQLKSSINDAAEFRVVADAMKVIGFKPEEIQTVYKILAAILHLGNLKFVVDGDTPLIENGKVVSIIAELLSTKTDMVEKALLYRTVATGRDIIDKQHTEQEASYGRDAFAKAIYERLFCWIVTRINDIIEVKNYDTTIHGKNTVIGVLDIYGFEIFDNNSFEQFCINYCNEKLQQLFIQLVLKQEQEEYQREGIPWKHIDYFNNQIIVDLVEQQHKGIIAILDDACMNVGKVTDEMFLEALNSKLGKHAHFSSRKLCASDKILEFDRDFRIRHYAGDVVYSVIGFIDKNKDTLFQDFKRLMYNSSNPVLKNMWPEGKLSITEVTKRPLTAATLFKNSMIALVDNLASKEPYYVRCIKPNDKKSPQIFDDERCRHQVEYLGLLENVRVRRAGFAFRQTYEKFLHRYKMISEFTWPNHDLPSDKEAVKKLIERCGFQDDVAYGKTKIFIRTPRTLFTLEELRAQMLIRIVLFLQKVWRGTLARMRYKRTKAALTIIRYYRRYKVKSYIHEVARRFHGVKTMRDYGKHVKWPSPPKVLRRFEEALQTIFNRWRASQLIKSIPASDLPQVRAKVAAVEMLKGQRADLGLQRAWEGNYLASKPDTPQTSGTFVPVANELKRKDKYMNVLFSCHVRKVNRFSKVEDRAIFVTDRHLYKMDPTKQYKVMKTIPLYNLTGLSVSNGKDQLVVFHTKDNKDLIVCLFSKQPTHESRIGELVGVLVNHFKSEKRHLQVNVTNPVQCSLHGKKCTVSVETRLNQPQPDFTKNRSGFILSVPGN

SEQ ID NO: 375 - DNA, 1545 bp, Homo Sapiens
tttccgcgagcgccggcactgcccgctccgagcccgtgtctgtcgggtgccgagccaactttcctgcgtccatgcagccccgccggcaacggctgcctgctccctggtccgggcccaggggcccgcgccccaccgccccgctgctcgcgctgctgctgttgctcgccccggtggcggcgcccgcggggtccggggaccccgacgaccctgggcagcctcaggatgctggggtcccgcgcaggctcctgcagcaggcggcgcgcgcggcgcttcacttcttcaacttccggtccggctcgcccagcgcgctacgagtgctggccgaggtgcaggagggccgcgcgtggattaatccaaaagagggatgtaaagttcacgtggtcttcagcacagagcgctacaacccagagtctttacttcaggaaggtgagggacgtttggggaaatgttctgctcgagtgtttttcaagaatcagaaacccagaccaaccatcaatgtaacttgtacacggctcatcgagaaaaagaaaagacaacaagaggattacctgctttacaagcaaatgaagcaactgaaaaaccccttggaaatagtcagcatacctgataatcatggacatattgatccctctctgagactcatctgggatttggctttccttggaagctcttacgtgatgtgggaaatgacaacacaggtgtcacactactacttggcacagctcactagtgtgaggcagtggaaaactaatgatgatacaattgattttgattatactgttctacttcatgaattatcaacacaggaaataattccctgtcgcattcacttggtctggtaccctggcaaacctcttaaagtgaagtaccactgtcaagagctacagacaccagaagaagcctccggaactgaagaaggatcagctgtagtaccaacagagcttagtaatttctaaaaagaaaaaatgatctttttccgacttctaaacaagtgactatactagcataaatcattcttctagtaaaacagctaaggtatagacattctaataatttgggaaaacctatgattacaagtaaaaactcagaaatgcaaagatgttggttttttgtttctcagtctgctttagcttttaactctggaagcgcatgcacactgaactctgctcagtgctaaacagtcaccagcaggttcctcagggtttcagccctaaaatgtaaaacctggataatcagtgtatgttgcaccagaatcagcattttttttttaactgcaaaaaatgatggtctcatctctgaatttatatttctcattcttttgaacatactatagctaatatattttatgttgctaaattgcttctatctagcatgttaaacaaagataatatactttcgatgaaagtaaattataggaaaaaaattaactgttttaaaaagaacttgattatgttttatgatttcaggcaagtattcatttttaacttgctacctacttttaaataaatgtttacatttctaaataaaaaaaaaaaaaaaaaaaaa

SEQ ID NO: 376 - protein, 294 aa, Homo Sapiens
MQPRRQRLPAPWSGPRGPRPTAPLLALLLLLAPVAAPAGSGDPDDPGQPQDAGVPRRLLQQAARAALHFFNFRSGSPSALRVLAEVQEGRAWINPKEGCKVHVVFSTERYNPESLLQEGEGRLGKCSARVFFKNQKPRPTINVTCTRLIEKKKRQQEDYLLYKQMKQLKNPLEIVSIPDNHGHIDPSLRLIWDLAFLGSSYVMWEMTTQVSHYYLAQLTSVRQWKTNDDTIDFDYTVLLHELSTQEIIPCRIHLVWYPGKPLKVKYHCQELQTPEEASGTEEGSAVVPTELSNF

SEQ ID NO: 377 - DNA, 2518 bp, Homo Sapiens
ctcatttgtgtgttttctgagtcagcattagctaaattttccagaaggccatccacaaagtacagcctgggcgttcaagggacgtcattcatttcccccagtgaccttgacaagtcagaagcttgaaagcagggaaatccggatgtctcggttatgaagtggagcagtgagtgtgagcctcaacatagttccagaactctccatccggactagttattgagcatctgcctctcatatcaccagtggccatctgaggtgtttccctggctctgaaggggtaggcacgatggccaggtgcttcagcctggtgttgcttctcacttccatctggaccacgaggctcctggtccaaggctctttgcgtgcagaagagctttccatccaggtgtcatgcagaattatggggatcacccttgtgagcaaaaaggcgaaccagcagctgaatttcacagaagctaaggaggcctgtaggctgctgggactaagtttggccggcaaggaccaagttgaaacagccttgaaagctagctttgaaacttgcagctatggctgggttggagatggattcgtggtcatctctaggattagcccaaaccccaagtgtgggaaaaatggggtgggtgtcctgatttggaaggttccagtgagccgacagtttgcagcctattgttacaactcatctgatacttggactaactcgtgcattccagaaattatcaccaccaaagatcccatattcaacactcaaactgcaacacaaacaacagaatttattgtcagtgacagtacctactcggtggcatccccttactctacaatacctgcccctactactactcctcctgctccagcttccacttctattccacggagaaaaaaattgatttgtgtcacagaagtttttatggaaactagcaccatgtctacagaaactgaaccatttgttgaaaataaagcagcattcaagaatgaagctgctgggtttggaggtgtccccacggctctgctagtgcttgctctcctcttctttggtgctgcagctggtcttggattttgctatgtcaaaaggtatgtgaaggccttcccttttacaaacaagaatcagcagaaggaaatgatcgaaaccaaagtagtaaaggaggagaaggccaatgatagcaaccctaatgaggaatcaaagaaaactgataaaaacccagaagagtccaagagtccaagcaaaactaccgtgcgatgcctggaagctgaagtttagatgagacagaaatgaggagacacacctgaggctggtttctttcatgctccttaccctgccccagctggggaaatcaaaagggccaaagaaccaaagaagaaagtccacccttggttcctaactggaatcagctcaggactgccattggactatggagtgcaccaaagagaatgcccttctccttattgtaaccctgtctggatcctatcctcctacctccaaagcttcccacggcctttctagcctggctatgtcctaataatatcccactgggagaaaggagttttgcaaagtgcaaggacctaaaacatctcatcagtatccagtggtaaaaaggcctcctggctgtctgaggctaggtgggttgaaagccaaggagtcactgagaccaaggctttctctactgattccgcagctcagaccctttcttcagctctgaaagagaaacacgtatcccacctgacatgtccttctgagcccggtaagagcaaaagaatggcagaaaagtttagcccctgaaagccatggagattctcataacttgagacctaatctctgtaaagctaaaataaagaaatagaacaaggctgaggatacgacagtacactgtcagcagggactgtaaacacagacagggtcaaagtgttttctctgaacacattgagttggaatcactgtttagaacacacacacttactttttctggtctctaccactgctgatattttctctaggaaatatacttttacaagtaacaaaaataaaaactcttataaatttctatttttatctgagttacagaaatgattactaaggaagattactcagtaatttgtttaaaaagtaataaaattcaacaaacatttgctgaatagctactatatgtcaagtgctgtgcaaggtattacactctgtaattgaatattattcctcaaaaaattgcacatagtagaacgctatctgggaagctatttttttcagttttgatatttctagcttatctacttccaaactaatttttatttttgctgagactaatcttattcattttctctaatatggcaaccattataaccttaatttattattaacatacctaagaagtacattgttacctctatataccaaagcacattttaaaagtgccattaacaaatgtatcactagccctcctttttccaacaagaagggactgagagatgcagaaatatttgtgacaaaaaattaaagcatttagaaaacttcaaaaaaaaaaaaaaaaaa

SEQ ID NO: 378 - protein, 322 aa, Homo Sapiens
MARCFSLVLLLTSIWTTRLLVQGSLRAEELSIQVSCRIMGITLVSKKANQQLNFTEAKEACRLLGLSLAGKDQVETALKASFETCSYGWVGDGFVVISRISPNPKCGKNGVGVLIWKVPVSRQFAAYCYNSSDTWTNSCIPEIITTKDPIFNTQTATQTTEFIVSDSTYSVASPYSTIPAPTTTPPAPASTSIPRRKKLICVTEVFMETSTMSTETEPFVENKAAFKNEAAGFGGVPTALLVLALLFFGAAAGLGFCYVKRYVKAFPFTNKNQQKEMIETKVVKEEKANDSNPNEESKKTDKNPEESKSPSKTTVRCLEAEV

SEQ ID NO: 379 - DNA, 1258 bp, Homo Sapiens
caccattaggcaaagatagtttctctagagagaatcatgcctgctaattacacgtgtaccaggccagatggagacaatacagattttcgatactttatttatgcagtgacatacactgtcattcttgtgccaggtctcatagggaatatattagccctgtgggtattctatggttatatgaaagaaacaaaacgagctgtgatatttatgataaacttagccattgctgacttactacaagttctttccttgccactgaggatcttctactacttgaatcatgactggccatttgggcctggtctctgcatgttctgtttctacctgaagtatgtcaacatgtatgcaagcatctacttcttggtctgcatcagtgtgcgacgattttggtttctcatgtacccctttcgcttccatgactgcaaacagaaatatgacctgtacatcagcattgctggctggctgatcatctgccttgcctgtgtactctttccactcctcagaaccagtgatgatacctctggcaataggaccaaatgctttgtggatcttcctaccaggaatgtcaacctggcccagtccgttgttatgatgaccattggcgagttgattgggtttgtaactccgcttctgattgtcctatattgtacctggaagacggttttatcactgcaagataaatatcccatggcccaagatcttggagagaaacagaaagccttgaagatgattctaacctgtgcaggggtattcctaatttgctttgcaccttatcatttcagttttcctttagatttcctggtgaagtccaatgaaattaaaagctgcctagccagaagggtgattctaatatttcattctgtggcattgtgtcttgctagtctgaattcatgtcttgacccagtcatatactacttttccactaatgagttccgaagacggctttcaagacaagatttgcatgacagcatccaactccatgcaaaatcctttgtgagtaaccatacagcttccaccatgacacctgaattatgctaaaacaaaaaaccaaactgaatgtgacctgaaatgcaagtacatcagaacatatctgcaatacccaagccacagggaagaacttgcaaaacaacacagcttttcagttctgctctatcttactgctatggggaattcacttcttcaaagcaggacctatttggagcattacgatccacgattattgatgttgacatgtccatgtagtaatttttcttcaagt

SEQ ID NO: 380 - protein, 333 aa, Homo Sapiens
MPANYTCTRPDGDNTDFRYFIYAVTYTVILVPGLIGNILALWVFYGYMKETKRAVIFMINLAIADLLQVLSLPLRIFYYLNHDWPFGPGLCMFCFYLKYVNMYASIYFLVCISVRRFWFLMYPFRFHDCKQKYDLYISIAGWLIICLACVLFPLLRTSDDTSGNRTKCFVDLPTRNVNLAQSVVMMTIGELIGFVTPLLIVLYCTWKTVLSLQDKYPMAQDLGEKQKALKMILTCAGVFLICFAPYHFSFPLDFLVKSNEIKSCLARRVILIFHSVALCLASLNSCLDPVIYYFSTNEFRRRLSRQDLHDSIQLHAKSFVSNHTASTMTPELC

SEQ ID NO: 381 - DNA, 2031 bp, Homo Sapiens
gccgcccggttgcgcggaccggcgctagtgcgcgggtgggggcggcgcgccgcggtggcccggcgtcccgtgtgcgtccagtgtgcgccccgcgggggcgcggccagcgccagagtagatacctgtcccgcccgccgcggccagcagcctcggaggaagccagggcaaagagggccggcggagaccaggtccgcgccggaggaagccgcgcccggccgaggccccggaccctgcgccccgagctccacggcaccatggccccgaagctgctgctcctcctctgcctgttctcgggcttgcacgcgcggtccagaaaggtggaagaggatgaatatgaagattcatcatcaaaccaaaagtgggtcttggctccaaaatcccaagacaccgacgtgactcttattctcaacaagttgctaagagaatatgataaaaagctgaggccagatattggaataaaaccgaccgtaattgacgttgacatttatgttaacagcattggtcctgtgtcatcaataaacatggaataccaaattgacatattttttgctcagacctggacagatagtcgccttcgattcaacagcacaatgaaaattcttactctgaacagcaacatggtggggttaatctggatcccagacaccatcttccgcaattctaaaaccgcagaggctcactggatcaccacacccaatcagctcctccggatttggaatgacgggaaaatcctttacactttgaggctcaccatcaatgctgagtgccagctgcagctgcacaacttccccatggacgaacactcctgcccgctgattttctccagctatggctatcccaaagaagaaatgatttatagatggagaaaaaattcagtggaggcagctgaccagaaatcatggcggctttatcagtttgacttcatgggcctcagaaacaccacagaaatcgtgacaacgtctgcaggtgattatgttgtcatgactatatattttgaattgagtagaagaatgggatacttcaccattcagacatacattccctgtatactgactgtggttttatcctgggtgtcattttggatcaaaaaagatgctacgccagcaagaacagcattaggcatcaccacggtgctgaccatgaccaccctgagcaccatcgccaggaagtccttgccacgcgtgtcctacgtgaccgccatggacctttttgtgaccgtgtgcttcctgtttgtcttcgccgcgctgatggagtatgccaccctcaactactattccagctgtagaaaaccaaccaccacgaagaagacaacatcgttactacatccagattcctcaagatggattcctgagcgaataagcctacaagccccttccaactattccctcctggacatgaggccaccaccaactgcgatgatcactttaaacaattccgtttactggcaggaatttgaagatacctgtgtctatgagtgtctggatggcaaagactgtcagagcttcttctgctgctatgaagaatgtaaatcaggatcctggaggaaagggcgtattcacatagacatcttggagctggactcgtactcccgggtctttttccccacgtccttcctgctctttaacctggtctactgggttggatacctgtatctctaagtgttgctcagagtgaagagtgaagagcatttggtacacacttgaccttctgtcgtccccagaccagtagtgaccaatcgggagtagcaaggaaggacactgcccagtgtatcttgttataaatgacctttcagcaacacaggaagtacccagcaaaggtttctattatgtattttacacacacacatacatacacacacacagctaattgagttttaaagtaatattcttgctaatccctactgaattgtagcttggtgttgtttctgaatggtttttggatattggaagcagccgctgattacccttgcaaagaaatctgtaaaatgtgcacgtgaatgtctgaaaaaaaaaaaaaaaaaaaaaaaaaaaa

SEQ ID NO: 382 - protein, 467 aa, Homo Sapiens
MAPKLLLLLCLFSGLHARSRKVEEDEYEDSSSNQKWVLAPKSQDTDVTLILNKLLREYDKKLRPDIGIKPTVIDVDIYVNSIGPVSSINMEYQIDIFFAQTWTDSRLRFNSTMKILTLNSNMVGLIWIPDTIFRNSKTAEAHWITTPNQLLRIWNDGKILYTLRLTINAECQLQLHNFPMDEHSCPLIFSSYGYPKEEMIYRWRKNSVEAADQKSWRLYQFDFMGLRNTTEIVTTSAGDYVVMTIYFELSRRMGYFTIQTYIPCILTVVLSWVSFWIKKDATPARTALGITTVLTMTTLSTIARKSLPRVSYVTAMDLFVTVCFLFVFAALMEYATLNYYSSCRKPTTTKKTTSLLHPDSSRWIPERISLQAPSNYSLLDMRPPPTAMITLNNSVYWQEFEDTCVYECLDGKDCQSFFCCYEECKSGSWRKGRIHIDILELDSYSRVFFPTSFLLFNLVYWVGYLYL

SEQ ID NO: 383 - DNA, 1145 bp, Homo Sapiens
atttcactcagtgcttaccagagcgcgttgtctaccctgtaccgaagacagaggctgtggggacagcctaggggcctggatctattgcctacttagagagaggccaactcagacacagccgtgtatgctcccagcagcaacggaggttcagctccgcctgcagggacagaaagacatggtctggaaatggatgccacttctgctgcttctggtctgtgtagccaccatgtgcagtgcccaggacaggactgatctcctcaatgtctgtatggatgccaagcaccacaagacaaagccaggtcctgaggacaagctgcatgaccaatgcagtccctggaagaagaatgcctgctgcacagccagcaccagccaggagctgcacaaggacacctcccgcctgtacaactttaactgggaccactgcggcaagatggagcccgcctgcaagcgccacttcatccaggacacctgtctctatgagtgctcacccaacctggggccctggatccagcaggtgaatcagagctggcgcaaagaacgcttcctggatgtgcccttatgcaaagaggactgtcagcgctggtgggaggattgtcacacctcccacacgtgcaagagcaactggcacagaggatgggactggacctcaggagttaacaagtgcccagctggggctctctgccgcacctttgagtcctacttccccactccagctgccctttgtgaaggcctctggagtcactcatacaaggtcagcaactacagccgagggagcggccgctgcatccagatgtggtttgattcagcccagggcaaccccaacgaggaagtggcgaggttctatgctgcagccatgcatgtgaatgctggtgagatgcttcatgggactgggggtctcctgctcagtctggccctgatgctgcaactctggctccttggctgagttcagtcctcccagactacctgccctcagcttggataaccaggctgggctcagctcagctcccacaaatgacagccccttaagcatgcttctattagtcacctaaccctctgtcacccagtctgttgctgctccatggtggggccaagagtcacttctaataaacagactgttttctaataattccaaaaaaaaaaaaaaa

SEQ ID NO: 384 - protein, 255 aa, Homo Sapiens
MVWKWMPLLLLLVCVATMCSAQDRTDLLNVCMDAKHHKTKPGPEDKLHDQCSPWKKNACCTASTSQELHKDTSRLYNFNWDHCGKMEPACKRHFIQDTCLYECSPNLGPWIQQVNQSWRKERFLDVPLCKEDCQRWWEDCHTSHTCKSNWHRGWDWTSGVNKCPAGALCRTFESYFPTPAALCEGLWSHSYKVSNYSRGSGRCIQMWFDSAQGNPNEEVARFYAAAMHVNAGEMLHGTGGLLLSLALMLQLWLLG

SEQ ID NO: 385 - DNA, 1862 bp, Homo Sapiens
ctgcaatggggttgctactgctgcggctaaccaaacagctcatgcttctctgaagacttgcagcaaggcttgctgaggctcacagaagatagccccagtgttttggagtggttttgaatgtgattctgagatcagactgactgagctggaatcctggctttatatcttaccagctacacaaccttggagtcttagaaattttttcttttcaataagcagtcatccttactttccctcaagatgacaaacagttcgttcttctgcccagtttataaagatctggagccattcacgtattttttttatttagttttccttgttggaattattggaagttgttttgcaacctgggcttttatacagaagaatacgaatcacaggtgtgtgagcatctacttaattaatttgcttacagccgatttcctgcttactctggcattaccagtgaaaattgttgttgacttgggtgtggcaccttggaagctgaagatattccactgccaagtaacagcctgcctcatctatatcaatatgtatttatcaattatcttcttagcatttgtcagcattgaccgctgtcttcagctgacacacagctgcaagatctaccgaatacaagaacccggatttgccaaaatgatatcaaccgttgtgtggctaatggtccttcttataatggtgccaaatatgatgattcccatcaaagacatcaaggaaaagtcaaatgtgggttgtatggagtttaaaaaggaatttggaagaaattggcatttgctgacaaatttcatatgtgtagcaatatttttaaatttctcagccatcattttaatatccaattgccttgtaattcgacagctctacagaaacaaagataatgaaaattacccaaatgtgaaaaaggctctcatcaacatacttttagtgaccacgggctacatcatatgctttgttccttaccacattgtccgaatcccgtataccctcagccagacagaagtcataactgattgctcaaccaggatttcactcttcaaagccaaagaggctacactgctcctggctgtgtcgaacctgtgctttgatcctatcctgtactatcacctctcaaaagcattccgctcaaaggtcactgagacttttgcctcacctaaagagaccaaggctcagaaagaaaaattaagatgtgaaaataatgcataaaagacaggattttttgtgctaccaattctggccttactggaccataaagttaattatagctttgaaagataaaaaaaaaaaaaacaaaaaaaaactcagtatgaaaaaatacagttagctagcaaatatggacaggtttacttagaaatcctgtttctaaatgcaagtcaagctttattgttaggcttgctgctactcattaacccaaatatttgtacaaaaaactaaagagtctcattgaacgaatgtaaaatcctgcaatatccttgaaatccaaaagaggtccatgacatagacccaaaggtattcatgagttattcatttaaatgcctggaactgacttcttgataaaaatataaaaaataatttccatgtaagttaccagaaagcccaccagcaacataattttaaagcctttcagattacttttaaaaaatgcagcttacatataacaacttgtgcctattttatttctaatctatcacttcaaaagatggtaatctttcaactcattattcctccaatttttaatgtcgaatttttttctaacacaataaccaaaagcttttatttataaaaaggcttgaaaaatataaaaaaaaaaaaaaaaaaaaaaaaaaaaaaaaaaaaaaaaaaaaaaaaaaaaaaaaaaaaaaaaaaaa

SEQ ID NO: 386 - protein, 319 aa, Homo Sapiens
MTNSSFFCPVYKDLEPFTYFFYLVFLVGIIGSCFATWAFIQKNTNHRCVSIYLINLLTADFLLTLALPVKIVVDLGVAPWKLKIFHCQVTACLIYINMYLSIIFLAFVSIDRCLQLTHSCKIYRIQEPGFAKMISTVVWLMVLLIMVPNMMIPIKDIKEKSNVGCMEFKKEFGRNWHLLTNFICVAIFLNFSAIILISNCLVIRQLYRNKDNENYPNVKKALINILLVTTGYIICFVPYHIVRIPYTLSQTEVITDCSTRISLFKAKEATLLLAVSNLCFDPILYYHLSKAFRSKVTETFASPKETKAQKEKLRCENNA

SEQ ID NO: 387 - DNA, 1828 bp, Homo Sapiens
cagttacagggagcaccaccagggaacatctcggggagcctggttggaagctgcaggcttagtctgtcggctgcgggtctctgactgccctgtggggagggtcttgccttaacatcccttgcatttggctgcaaagaaatctgcttggaagaaggggttacgctgtttggccgggcagaaactccgctgagcagaacttgccgccagaatgctcctcctgttgctgagtatcatcgtcctccacgtcgcggtgctggtgctgctgttcgtctccacgatcgtcagccaatggatcgtgggcaatggacacgcaactgatctctggcagaactgtagcacctcttcctcaggaaatgtccaccactgtttctcatcatcaccaaacgaatggctgcagtctgtccaggccaccatgatcctgtcgatcatcttcagcattctgtctctgttcctgttcttctgccaactcttcaccctcaccaaggggggcaggttttacatcactggaatcttccaaattcttgctggtctgtgcgtgatgagtgctgcggccatctacacggtgaggcacccggagtggcatctcaactcggattactcctacggtttcgcctacatcctggcctgggtggccttccccctggcccttctcagcggtgtcatctatgtgatcttgcggaaacgcgaatgaggcgcccagacggtctgtctgaggctctgagcgtacatagggaagggaggaagggaaaacagaaagcagacaaagaaaaaagagctagcccaaaatcccaaactcaaaccaaaccaaacagaaagcagtggaggtgggggttgctgttgattgaagatgtatataatatctccggtttataaaacctatttataacactttttacatatatgtacatagtattgtttgctttttatgttgaccatcagcctcgtgttgagccttaaagaagtagctaaggaactttacatcctaacagtataatccagctcagtatttttgttttgttttttgtttgtttgttttgttttacccagaaataagataactccatctcgccccttccctttcatctgaaagaagatacctccctcccagtccacctcatttagaaaaccaaagtgtgggtagaaaccccaaatgtccaaaagcccttttctggtgggtgacccagtgcatccaacagaaacagccgctgcccgaacctctgtgtgaagctttacgcgcacacggacaaaatgcccaaactggagcccttgcaaaaacacggcttgtggcattggcatacttgcccttacaggtggagtatcttcgtcacacatctaaatgagaaatcagtgacaacaagtctttgaaatggtgctatggatttaccattccttattatcactaatcatctaaacaactcactggaaatccaattaacaattttacaacataagatagaatggagacctgaataattctgtgtaatataaatggtttataactgcttttgtacctagctaggctgctattattactataatgagtaaatcataaagccttcatcactcccacatttttcttacggtcggagcatcagaacaagcgtctagactccttgggaccgtgagttcctagagcttggctgggtctaggctgttctgtgcctccaaggactgtctggcaatgacttgtattggccaccaactgtagatgtatatatggtgcccttctgatgctaagactccagaccttttgtttttgctttgcattttctgattttataccaactgtgtggactaagatgcattaaaataaacatcagagtaactc

SEQ ID NO: 388 - protein, 160 aa, Homo Sapiens
MLLLLLSIIVLHVAVLVLLFVSTIVSQWIVGNGHATDLWQNCSTSSSGNVHHCFSSSPNEWLQSVQATMILSIIFSILSLFLFFCQLFTLTKGGRFYITGIFQILAGLCVMSAAAIYTVRHPEWHLNSDYSYGFAYILAWVAFPLALLSGVIYVILRKRE

SEQ ID NO: 389 - DNA, 2424 bp, Homo Sapiens
gcatcctctcaccgccggaagctgaactgactcgtccgcggccgctctaccccaacaggccgccaccagcgagagtgcggccataaccatcacgtgaccgcccaccgacaccagcgagagtgcagtcgtaaccgtcacgtgaccgcccaccgtcggcccggcgctcccctccgcccgaagctagcaagcggcgcggccaatgagaaaggcgcatgcctggcccccgccggcctgcagtctagccgtagtgcgcctgcgcgcggctaggaggggccgtcaggcggggatacagcctggaaggtgcgtgtggggctgggtctcggagtgggagacgtggagtgcaggctggagcgaccgtgtctggggagccgagccccgcttctcgctgcggtgagcccggactggggcacgcactgcgcagactccccgctgcagtgggcggagctcccacaggccccgccccctcctcccaccctcgttcagcctgtccagacagaagctggggcccaccggaggtagctgcagacgcctgagagcgaggccgaggcccctcagggtttggagaccctgacacacccaccttctcacctgggctctgcgtatcccccagccttgagggaagatgaagcctaaactgatgtaccaggagctgaaggtgcctgcagaggagcccgccaatgagctgcccatgaatgagattgaggcgtggaaggctgcggaaaagaaagcccgctgggtcctgctggtcctcattctggcggttgtgggcttcggagccctgatgactcagctgtttctatgggaatacggcgacttgcatctctttgggcccaaccagcgcccagccccctgctatgacccttgcgaagcagtgctggtggaaagcattcctgagggcctggacttccccaatgcctccacggggaacccttccaccagccaggcctggctgggcctgctcgccggtgcgcacagcagcctggacatcgcctccttctactggaccctcaccaacaatgacacccacacgcaggagccctctgcccagcagggtgaggaggtcctccggcagctgcagaccctggcaccaaagggcgtgaacgtccgcatcgctgtgagcaagcccagcgggccccagccacaggcggacctgcaggctctgctgcagagcggtgcccaggtccgcatggtggacatgcagaagctgacccatggcgtcctgcataccaagttctgggtggtggaccagacccacttctacctgggcagtgccaacatggactggcgttcactgacccaggtcaaggagctgggcgtggtcatgtacaactgcagctgcctggctcgagacctgaccaagatctttgaggcctactggttcctgggccaggcaggcagctccatcccatcaacttggccccggttctatgacacccgctacaaccaagagacaccaatggagatctgcctcaatggaacccctgctctggcctacctggcgagtgcgcccccacccctgtgtccaagtggccgcactccagacctgaaggctctactcaacgtggtggacaatgcccggagtttcatctacgtcgctgtcatgaactacctgcccactctggagttctcccaccctcacaggttctggcctgccattgacgatgggctgcggcgggccacctacgagcgtggcgtcaaggtgcgcctgctcatcagctgctggggacactcggagccatccatgcgggccttcctgctctctctggctgccctgcgtgacaaccatacccactctgacatccaggtgaaactctttgtggtccccgcggatgaggcccaggctcgaatcccatatgcccgtgtcaaccacaacaagtacatggtgactgaacgcgccacctacatcggaacctccaactggtctggcaactacttcacggagacggcgggcacctcgctgctggtgacgcagaatgggaggggcggcctgcggagccagctggaggccattttcctgagggactgggactccccttacagccatgaccttgacacctcagctgacagcgtgggcaacgcctgccgcctgctctgaggcccgatccagtgggcaggccaaggcctgctgggcccccgcggacccaggtgctctgggtcacggtccctgtccccgcgcccccgcttctgtctgccccattgtggctcctcaggctctctcccctgctctcccacctctacctccacccccaccggcctgacgctgtggccccgggacccagcagagctgggggagggatcagcccccaaagaaatgggggtgcatgctgggcctggccccctggcccacccccactttccagggcaaaaagggcccagggttataataagtaaataacttgtctgtaaaaaaaaaaaaaaaaaaaa

SEQ ID NO: 390 - protein, 490 aa, Homo Sapiens
MKPKLMYQELKVPAEEPANELPMNEIEAWKAAEKKARWVLLVLILAVVGFGALMTQLFLWEYGDLHLFGPNQRPAPCYDPCEAVLVESIPEGLDFPNASTGNPSTSQAWLGLLAGAHSSLDIASFYWTLTNNDTHTQEPSAQQGEEVLRQLQTLAPKGVNVRIAVSKPSGPQPQADLQALLQSGAQVRMVDMQKLTHGVLHTKFWVVDQTHFYLGSANMDWRSLTQVKELGVVMYNCSCLARDLTKIFEAYWFLGQAGSSIPSTWPRFYDTRYNQETPMEICLNGTPALAYLASAPPPLCPSGRTPDLKALLNVVDNARSFIYVAVMNYLPTLEFSHPHRFWPAIDDGLRRATYERGVKVRLLISCWGHSEPSMRAFLLSLAALRDNHTHSDIQVKLFVVPADEAQARIPYARVNHNKYMVTERATYIGTSNWSGNYFTETAGTSLLVTQNGRGGLRSQLEAIFLRDWDSPYSHDLDTSADSVGNACRLL

SEQ ID NO: 391 - DNA, 1869 bp, Homo Sapiens
ggagtttgagtgagagatatagggaaggaagggaagtaagcagtcacagacgctggcggccaccagaagtttgagcctctttggtagcaggaggctggaagaaaggacagaagtagctctggctgtgatggggatcttactgggcctgctactcctggggcacctaacagtggacacttatggccgtcccatcctggaagtgccagagagtgtaacaggaccttggaaaggggatgtgaatcttccctgcacctatgaccccctgcaaggctacacccaagtcttggtgaagtggctggtacaacgtggctcagaccctgtcaccatctttctacgtgactcttctggagaccatatccagcaggcaaagtaccagggccgcctgcatgtgagccacaaggttccaggagatgtatccctccaattgagcaccctggagatggatgaccggagccactacacgtgtgaagtcacctggcagactcctgatggcaaccaagtcgtgagagataagattactgagctccgtgtccagaaactctctgtctccaagcccacagtgacaactggcagcggttatggcttcacggtgccccagggaatgaggattagccttcaatgccaggctcggggttctcctcccatcagttatatttggtataagcaacagactaataaccaggaacccatcaaagtagcaaccctaagtaccttactcttcaagcctgcggtgatagccgactcaggctcctatttctgcactgccaagggccaggttggctctgagcagcacagcgacattgtgaagtttgtggtcaaagactcctcaaagctactcaagaccaagactgaggcacctacaaccatgacataccccttgaaagcaacatctacagtgaagcagtcctgggactggaccactgacatggatggctaccttggagagaccagtgctgggccaggaaagagcctgcctgtctttgccatcatcctcatcatctccttgtgctgtatggtggtttttaccatggcctatatcatgctctgtcggaagacatcccaacaagagcatgtctacgaagcagccagggcacatgccagagaggccaacgactctggagaaaccatgagggtggccatcttcgcaagtggctgctccagtgatgagccaacttcccagaatctgggcaacaactactctgatgagccctgcataggacaggagtaccagatcatcgcccagatcaatggcaactacgcccgcctgctggacacagttcctctggattatgagtttctggccactgagggcaaaagtgtctgttaaaaatgccccattaggccaggatctgctgacataattgcctagtcagtccttgccttctgcatggccttcttccctgctacctctcttcctggatagcccaaagtgtccgcctaccaacactggagccgctgggagtcactggctttgccctggaatttgccagatgcatctcaagtaagccagctgctggatttggctctgggcccttctagtatctctgccgggggcttctggtactcctctctaaataccagagggaagatgcccatagcactaggacttggtcatcatgcctacagacactattcaactttggcatcttgccaccagaagacccgagggaggctcagctctgccagctcagaggaccagctatatccaggatcatttctctttcttcagggccagacagcttttaattgaaattgttatttcacaggccagggttcagttctgctcctccactataagtctaatgttctgactctctcctggtgctcaataaatatctaatcataacagcaaaaaaaaaaaaaaaaaaa

SEQ ID NO: 392 - protein, 399 aa, Homo Sapiens
MGILLGLLLLGHLTVDTYGRPILEVPESVTGPWKGDVNLPCTYDPLQGYTQVLVKWLVQRGSDPVTIFLRDSSGDHIQQAKYQGRLHVSHKVPGDVSLQLSTLEMDDRSHYTCEVTWQTPDGNQVVRDKITELRVQKLSVSKPTVTTGSGYGFTVPQGMRISLQCQARGSPPISYIWYKQQTNNQEPIKVATLSTLLFKPAVIADSGSYFCTAKGQVGSEQHSDIVKFVVKDSSKLLKTKTEAPTTMTYPLKATSTVKQSWDWTTDMDGYLGETSAGPGKSLPVFAIILIISLCCMVVFTMAYIMLCRKTSQQEHVYEAARAHAREANDSGETMRVAIFASGCSSDEPTSQNLGNNYSDEPCIGQEYQIIAQINGNYARLLDTVPLDYEFLATEGKSVC

SEQ ID NO: 393 - DNA, 11332 bp, Homo Sapiens
ttttttttttccccaagcgaagcatgaacagttgctaagtggaaaatggaggctgaattttacatggtgattcttacctgcttgatcttcaggaactcagaagggtttcagattgtccatgtccagaaacaacagtgtcttttcaaaaatgagaaagtggtcgtgggctcatgcaacaggaccatccagaaccagcagtggatgtggactgaggatgaaaagctccttcatgttaaatctgcactgtgcttggccatctccaactcttcccgcggcccctcccgctcagccatcttggaccgctgttcccaggcaccccgatggacctgctatgatcaggaaggcttccttgaggtggaaaatgcctctctctttctccagaaacaaggctccagagtagtggtcaagaaggccaggaaatacctccatagctggatgaaaatagatgtcaacaaggagggaaaactggtcaatgaaagcctctgtttacaaaaagctggcctgggagcagaagtttcggtgaggagcactagaaacacggctccaccccagattctcactacctttaatgcagttccagatggcctggtattccttattaggaataccacagaggccttcatcagaaatgctgcagaaaactacagccaaaacagcagcgagaggcagcatcccaatctgcacatgactggaattacagacacatcatgggttttgtcgactactcagcccttctccagcaccactgaagagactggactggcggagccagagagatgtaacttcaccctggcggagtccaaggcctccagccattctgtgtctatccagtggagaattttgggctcaccctgtaactttagcctcatctatagcagtgacaccctgggggccgcgttgtgccctacctttcggatagacaacaccacatacggatgtaaccttcaagatttacaagcaggaaccatctataacttcaggattatttctctggatgaagagagaacagtggtcttgcaaacagatcctttacctcctgctaggtttggagtcagtaaagagaagacgacttcaaccagcttgcatgtttggtggactccttcttccggaaaagtcacctcatatgaggtgcaattatttgatgaaaataaccaaaagatacagggggttcaaattcaagaaagtacttcatggaatgaatacacttttttcaatctcactgctggtagtaaatacaatattgccatcacagctgtttctggaggaaaacgttctttttcagtttataccaatggatcaacagtgccatctccagtgaaagatattggtatttccacaaaagccaattctctcctgatttcctggtcccatggttctgggaatgtggaacgataccggctgatgctaatggataaagggatcctagttcatggcggtgttgtggacaaacatgctacttcctatgcttttcacgggctgacccctggctacctctacaacctcactgttatgactgaggctgcagggctgcaaaactacaggtggaaactagtcaggacagcccccatggaagtctcaaatctgaaggtgacaaatgatggcagtttgacctctctaaaagtcaaatggcaaagacctcctggaaatgtggattcttacaatatcaccctgtctcacaaagggaccatcaaggaatccagagtattagcaccttggattactgaaactcactttaaagagttagtccccggtcgactttatcaagttactgtcagctgtgtctctggtgaactgtctgctcagaagatggcagtgggcagaacatttccagacaaagttgcaaacctggaggcaaacaataatggcaggatgaggtctcttgtagtgagctggtcgccccctgctggagactgggagcagtatcggatcctactcttcaatgattctgtggtgctgctcaacatcactgtgggaaaggaagaaacacagtatgtcatggatgacacggggctcgtaccgggaagacagtatgaggtggaagtcattgttgagagtggaaatttgaagaattctgagcgttgccaaggcaggacagtccccctggctgtcctccagcttcgtgtcaaacatgccaatgaaacctcactgagtatcatgtggcagacccctgtagcagaatgggagaaatacatcatttccctagctgacagagacctcttactgatccacaagtcactctccaaagatgccaaagaattcacttttactgacctggtgcctggacgaaaatacatggctacagtcaccagtattagtggagacttaaaaaattcctcttcagtaaaaggaagaacagtgcctgcccaagtgactgacttgcatgtggccaaccaaggaatgaccagtagtctgtttactaactggacccaggcacaaggagacgtagaattttaccaagtcttactgatccatgaaaatgtggtcattaaaaatgaaagcatctccagtgagaccagcagatacagcttccactctctcaagtccggcagcctgtactccgtggtggtaacaacagtgagtggagggatctcttcccgacaagtggttgtggagggaagaacagtcccttccagtgtgagtggagtaacggtgaacaattccggtcgtaatgactacctcagcgtttcctggctgctggcgcccggagatgtggataactatgaggtaacattgtctcatgacggcaaggtggttcagtcccttgtcattgccaagtctgtcagagaatgttccttcagctccctcaccccaggccgcctctacaccgtgaccataactacaaggagtggcaagtatgaaaatcactccttcagccaagagcggacagtgcctgacaaagtccagggagtcagtgttagcaactcagccaggagtgactatttaagggtatcctgggtgcatgccactggagactttgatcactatgaagtcaccattaaaaacaaaaacaacttcattcaaactaaaagcattcccaagtcagaaaacgaatgtgtatttgttcagctagtccctggacggttgtacagtgtcactgttactacaaaaagtggacaatatgaagccaatgaacaagggaatgggagaacaattccagagcctgttaaggatctaacattgcgcaacaggagcactgaggacttgcatgtgacttggtcaggagctaatggggatgtcgaccaatatgagatccagctgctcttcaatgacatgaaagtatttcctccttttcaccttgtaaataccgcaaccgagtatcgatttacttccctaacaccaggccgccaatacaaaattcttgtcttgacgattagcggggatgtacagcagtcagccttcattgagggcttcacagttcctagtgctgtcaaaaatattcacatttctcccaatggagcaacagatagcctgacggtgaactggactcctggtgggggagacgttgattcctacacggtgtcggcattcaggcacagtcaaaaggttgactctcagactattcccaagcacgtctttgagcacacgttccacagactggaggccggggagcagtaccagatcatgattgcctcagtcagcgggtccctgaagaatcagataaatgtggttgggcggacagttccagcatctgtccaaggagtaattgcagacaatgcatacagcagttattccttaatagtaagttggcaaaaagctgctggtgtggcagaaagatatgatatcctgcttctaactgaaaatggaatccttctgcgcaacacatcagagccagccaccactaagcaacacaaatttgaagatctaacaccaggcaagaaatacaagatacagatcctaactgtcagtggaggcctctttagcaaggaagcccagactgaaggccgaacagtcccagcagctgtcaccgacctgaggatcacagagaactccaccaggcacctgtccttccgctggaccgcctcagagggggagctcagctggtacaacatctttttgtacaacccagatgggaatctccaggagagagctcaagttgacccactagtccagagcttctctttccagaacttgctacaaggcagaatgtacaagatggtgattgtaactcacagtggggagctgtctaatgagtctttcatatttggtagaacagtcccagcctctgtgagtcatctcagggggtccaatcggaacacgacagacagcctttggttcaactggagtccagcctctggggactttgacttttatgagctgattctctataatcccaatggcacaaagaaggaaaactggaaagacaaggacctgacggagtggcggtttcaaggccttgttcctggaaggaagtacgtgctgtgggtggtaactcacagtggagatctcagcaataaagtcacagcggagagcagaacagctccaagtcctcccagtcttatgtcatttgctgacattgcaaacacatccttggccatcacgtggaaagggcccccagactggacagactacaacgactttgagctgcagtggttgcccagagatgcacttactgtcttcaacccctacaacaacagaaaatcagaaggacgcattgtgtatggtcttcgtccagggagatcctatcaattcaacgtcaagactgtcagtggtgattcctggaaaacttacagcaaaccaatttttggatctgtgaggacaaagcctgacaagatacaaaacctgcattgccggcctcagaactccacggccattgcctgttcttggatccctcctgattctgactttgatggttatagtattgaatgccggaaaatggacacccaagaagttgagttttccagaaagctggagaaagaaaaatctctgctcaacatcatgatgctagtgccccataagaggtacctggtgtccatcaaagtgcagtcggccggcatgaccagcgaggtggttgaagacagcactatcacaatgatagaccgcccccctcctccacccccacacattcgtgtgaatgaaaaggatgtgctaattagcaagtcttccatcaactttactgtcaactgcagctggttcagcgacaccaatggagctgtgaaatacttcacagtggtggtgagagaggctgatggcagtgatgagctgaagccagaacagcagcaccctctcccttcctacctggagtacaggcacaatgcctccattcgggtgtatcagactaattattttgccagcaaatgtgccgaaaatcctaacagcaactccaagagttttaacattaagcttggagcagagatggagagcctaggtggaaaatgcgatcccactcagcaaaaattctgtgatggaccactgaagccacacactgcctacagaatcagcattcgagcttttacacagctctttgatgaggacctgaaggaattcacaaagccactctattcagacacatttttttctttacccatcactactgaatcagagcccttgtttggagctattgaaggtgtgagtgctggtctgtttttaattggcatgctagtggctgttgttgccttattgatctgcagacagaaagtgagccatggtcgagaaagaccctctgcccgtctgagcattcgtagggatcgaccattatctgtccacttaaacctgggccagaaaggtaaccggaaaacttcttgtccaataaaaataaatcagtttgaagggcatttcatgaagctacaggctgactccaactaccttctatccaaggaatacgaggagttaaaagacgtgggccgaaaccagtcatgtgacattgcactcttgccggagaatagagggaaaaatcgatacaacaatatattgccctatgatgccacgcgagtgaagctctccaatgtagatgatgatccttgctctgactacatcaatgccagctacatccctggcaacaacttcagaagagaatacattgtcactcagggaccgcttcctggcaccaaggatgacttctggaaaatggtgtgggaacaaaacgttcacaacatcgtcatggtgacccagtgtgttgagaagggccgagtaaagtgtgaccattactggccagcggaccaggattccctctactatggggacctcatcctgcagatgctctcagagtccgtcctgcctgagtggaccatccgggagtttaagatatgcggtgaggaacagcttgatgcacacagactcatccgccactttcactatacggtgtggccagaccatggagtcccagaaaccacccagtctctgatccagtttgtgagaactgtcagggactacatcaacagaagcccgggtgctgggcccactgtggtgcactgcagtgctggtgtgggtaggactggaacctttattgcattggaccgaatcctccagcagttagactccaaagactctgtggacatttatggagcagtgcacgacctaagacttcacagggttcacatggtccagactgagtgtcagtatgtctacctacatcagtgtgtaagagatgtcctcagagcaagaaagctacggagtgaacaagaaaaccccttgtttccaatctatgaaaatgtgaatccagagtatcacagagatccagtctattcaaggcattgagaatgtacctgaagagctcctggataaaaattattcactgtgtgatttgtttttaaaaacttgcttcatgccctacagaggtgccagctatttctgttgatactatgtataatttattaatctggagaatgtttaaaattttatataatttaaaggtaacagatattattgtacatagttgtattttgtagtttcttctgtaaatatgtatttttcataatgtttaatattaagctttatataatactatttttccacactaaagtgttcatgacttgttctacataaaactaattcaacctgtatgacaggactactggtaaaatgcatatggaggtggtggcagagacaatccttcaggccatgttttctacctgttttgatattcactggacaggaaaaagggcagggctagagagagcaaatactatggctagatttgctgcattgctgtcccatgaatctcgagagccaacagacatgtcctaacttgctattaggacaaatgtgacagtcaaaaaaaggattagagggagggagaaaaaagaattaagcagtaccaaagctgaactagatgcttgtgtctgaactagttgctctctctctcctttctccttccagggattcaagccaaagtggtcagctcagggatcatgtaacttgcagtgcaagcccaggatggtaggatgcagggttgagggttctgatagagaatgattccaaacagaagtgatgaattccttttgttaataagatgccagctatacccagactggaaacataacatgcaaagcactatctacagtgattagagatcctttcattgcattcatggtgtggagtgtgaacatccacacccatactgtaatgtatttatacacactagtttctgtctcattttcagtggtctccattcctagaaaagtcacaattatccattcctacttgatttcccattaaaagaatattatggtagcagattgtgcccctcattaaaaggcttaatgccaacattttcatagaaatgactacaaacatcatatatagtaaatttaaaaacaatagcaaaaacaaaaacagtggtcttcagtaaaattttcaaaacttcttttagtaaatcaatgaagtcaaaatgtcaagtaatcacccaaagttgcatttaataacaaaaggcactacatactgtaccaagtttatcttcaatatttgtgccttacttactttgactataacaaattccaatgagtcagaaagtatttccttcatcaaggtccagttccgacagcattcctgggaaaaatttgaaaggagtttgtacggaatcttcatagatacctgagaagatgagctggagatgtttgcctttttcacactacaaatttttctgtaataaacttgggaattagaggtcaagtttgttgatggcatagcttcctttgcataaagagtatatttcttttcaaagtatatatttttgtaacctaccataaagtccgtaagtgaatacaacgaatgtaattgacataataattgaaaatcattgactatacctaaaatagttctttataattaaataactctacacccaatctggaaatttttccaaggttatttgaagtttacaaaaatgtgaagcataatcataagcttcaaagattcacagtttcattgtgctcaatgctcttgtgaaatgacagtcttaagctctgattctgtatcaaggaactaagtgaatcttctggaaatgaaaaggaacaacatatgtgtaagtgcagtagatgtaccaccagcgagaaaatagaggtcagagatctacaacgtgtggcatccattagaaatcacctttcctacattgaaaagaaaaaagagaaaaagcagaattttacactaatgttgcttgatgcaaagcacattaatgcttggaaggatacattcattttcgacttttcattcactcagaaaacttctagtaagtatctgcaacctgctaggcactgttccagaatctacacatttctactcacataaagagaatcctcataaagttaggattgttgttactaccttcaattgagcttaaaagacagcctcatcaagggaatgggataactgagccagtctaggacagtggtcaccttccacaggccacacactggaaagtgctaatgctactttaatagcaaacctctggatctaggagagagagcaattaattgcacaaaccaggagttaaaaccataaaaaaaacctatgcatctgtaatagtaaataacactcacgtactctggcaacatctagggtagtatcagaattatgtaaatggacatgacagggaaaaatcgtaggtttttttagtctaatccaacccaggaaatgtttattcctaccctacacctaattttaaaccttcttagcaacaaatatttcactattcgctcctactcctgggaagactaaatatataattgacttatttattaaatttaggagaaaaaaaaagttttccttgacattcagctctattggatttatttccatttaattgcatcatgtgttatgtcttggtaaacactccatttcctgtcttggtgggcatcctgtctgtgtacctgtgcagtacactttaatcatcaagacttcaaagtgcttttgagctatcaaatcttgggagagtcccatctagcatcttaataattatttttccaagttcgttataattaactcctttaacctcatctcattaaatcaattttgtattgtcattctgttgttctctggaaagcagccaattgttcagctcttgaatcagaattttcaaagactcacctctcttacctgggcttgcacatatttgtcctaagtaattctctatcccttaaacctctgagtccctctgttttattacttgccccactcctcctacttgaatatgtttgttttcccagttgaatgtgatttttatctactgttcatattatcttttatacccatgagtataatttcatagtcctttcaggttccacatcatcaaagagatgaccataatttcacttttttttgaaatgaagtcttgctctgttgcccaggctggagtgcagtggcacaatctcagctcactacaacctccgcctcccaggttcaagcgattctgccttagcctcccaagtagctggaattacaggtgcctgccaccatgtctggctaatttttgtgtttttagtagagatggggtttcaccatgttggccaggctggtcttgaactcgtgaccttaggtgatccacccacctcaacctcccaaagtgctaggattacaagagtgagccaccgcacctggccaattcacttttaaatactaaaaggcacacagcacacagacattttcggggcagttttctttgggagggtctttgataaattttgtaatcacctctcggaagaaagcccaaaatgacatgtgaaaataatattaaaccatttaccagatgtccagcaatataaaaatagacctcacatgctacccttcacatgctgattctcttgccttgctgtttaaggatccagtttcttatgttaaacattttccttaccttttgcaataatattattggccatatactaaattctcattcacttagctttctaagaattctttgaggttggaatcctgaaatcataaagctaccagatctgcacaacagcagtggtagtatctgagcccaaactctgagacgctctagagttttagtttacaaacatgagccagaccaaacctgacctggtgaaaatcaataggtaataaactgcttgtatatgatagcagttcaagggctttctgggttccatttcactgaggaaatgaaaatataactgattagccaagacagagtggcaataaggaataactgatcctcctccaagttgcagtgagcaagccctcaagcctacctcattcctgaagagttgaaggagaaaatgccgtgctaattttctgccctgctatttttaacctgaaatttagaattacatcaggtattcaaagaatgttccctatcaaaggaaaatctgtaaacgatgactgcaaaaagcaagtgaaatgatgcaaagagaaaatatttgcaaaacagaatctaaccagacatcatcatgaagataaaatggcatctcttctgtgtggcctgggtgtgcttggacaatcctgtcacacgtttctattaggacatgttgcccttttgaggattcactctatgttggccagatggtttaactgattaaacaattgaatcaatttattttgctttttgaattgaccagatatttaactaaatgtactgggtttggcattttagacacactgccttagattcttgtagtgcatgatgactttgaaaatgtttggccattttagttaaaatgcagggtaacatttgatgcagccatgataacaggaaaaatctgttctgttctaaaaatgtttctagcaatagaagtatttctggctaagagaatactcttgacttgtagggaggctccctcggaataaatgtatgcaacacaaataaggcattttattttttaaaagattgtctatataagatacacttattaaataaagaaattgttggtgaatgctctgaaaa

SEQ ID NO: 394 - protein, 2215 aa, Homo Sapiens
MEAEFYMVILTCLIFRNSEGFQIVHVQKQQCLFKNEKVVVGSCNRTIQNQQWMWTEDEKLLHVKSALCLAISNSSRGPSRSAILDRCSQAPRWTCYDQEGFLEVENASLFLQKQGSRVVVKKARKYLHSWMKIDVNKEGKLVNESLCLQKAGLGAEVSVRSTRNTAPPQILTTFNAVPDGLVFLIRNTTEAFIRNAAENYSQNSSERQHPNLHMTGITDTSWVLSTTQPFSSTTEETGLAEPERCNFTLAESKASSHSVSIQWRILGSPCNFSLIYSSDTLGAALCPTFRIDNTTYGCNLQDLQAGTIYNFRIISLDEERTVVLQTDPLPPARFGVSKEKTTSTSLHVWWTPSSGKVTSYEVQLFDENNQKIQGVQIQESTSWNEYTFFNLTAGSKYNIAITAVSGGKRSFSVYTNGSTVPSPVKDIGISTKANSLLISWSHGSGNVERYRLMLMDKGILVHGGVVDKHATSYAFHGLTPGYLYNLTVMTEAAGLQNYRWKLVRTAPMEVSNLKVTNDGSLTSLKVKWQRPPGNVDSYNITLSHKGTIKESRVLAPWITETHFKELVPGRLYQVTVSCVSGELSAQKMAVGRTFPDKVANLEANNNGRMRSLVVSWSPPAGDWEQYRILLFNDSVVLLNITVGKEETQYVMDDTGLVPGRQYEVEVIVESGNLKNSERCQGRTVPLAVLQLRVKHANETSLSIMWQTPVAEWEKYIISLADRDLLLIHKSLSKDAKEFTFTDLVPGRKYMATVTSISGDLKNSSSVKGRTVPAQVTDLHVANQGMTSSLFTNWTQAQGDVEFYQVLLIHENVVIKNESISSETSRYSFHSLKSGSLYSVVVTTVSGGISSRQVVVEGRTVPSSVSGVTVNNSGRNDYLSVSWLLAPGDVDNYEVTLSHDGKVVQSLVIAKSVRECSFSSLTPGRLYTVTITTRSGKYENHSFSQERTVPDKVQGVSVSNSARSDYLRVSWVHATGDFDHYEVTIKNKNNFIQTKSIPKSENECVFVQLVPGRLYSVTVTTKSGQYEANEQGNGRTIPEPVKDLTLRNRSTEDLHVTWSGANGDVDQYEIQLLFNDMKVFPPFHLVNTATEYRFTSLTPGRQYKILVLTISGDVQQSAFIEGFTVPSAVKNIHISPNGATDSLTVNWTPGGGDVDSYTVSAFRHSQKVDSQTIPKHVFEHTFHRLEAGEQYQIMIASVSGSLKNQINVVGRTVPASVQGVIADNAYSSYSLIVSWQKAAGVAERYDILLLTENGILLRNTSEPATTKQHKFEDLTPGKKYKIQILTVSGGLFSKEAQTEGRTVPAAVTDLRITENSTRHLSFRWTASEGELSWYNIFLYNPDGNLQERAQVDPLVQSFSFQNLLQGRMYKMVIVTHSGELSNESFIFGRTVPASVSHLRGSNRNTTDSLWFNWSPASGDFDFYELILYNPNGTKKENWKDKDLTEWRFQGLVPGRKYVLWVVTHSGDLSNKVTAESRTAPSPPSLMSFADIANTSLAITWKGPPDWTDYNDFELQWLPRDALTVFNPYNNRKSEGRIVYGLRPGRSYQFNVKTVSGDSWKTYSKPIFGSVRTKPDKIQNLHCRPQNSTAIACSWIPPDSDFDGYSIECRKMDTQEVEFSRKLEKEKSLLNIMMLVPHKRYLVSIKVQSAGMTSEVVEDSTITMIDRPPPPPPHIRVNEKDVLISKSSINFTVNCSWFSDTNGAVKYFTVVVREADGSDELKPEQQHPLPSYLEYRHNASIRVYQTNYFASKCAENPNSNSKSFNIKLGAEMESLGGKCDPTQQKFCDGPLKPHTAYRISIRAFTQLFDEDLKEFTKPLYSDTFFSLPITTESEPLFGAIEGVSAGLFLIGMLVAVVALLICRQKVSHGRERPSARLSIRRDRPLSVHLNLGQKGNRKTSCPIKINQFEGHFMKLQADSNYLLSKEYEELKDVGRNQSCDIALLPENRGKNRYNNILPYDATRVKLSNVDDDPCSDYINASYIPGNNFRREYIVTQGPLPGTKDDFWKMVWEQNVHNIVMVTQCVEKGRVKCDHYWPADQDSLYYGDLILQMLSESVLPEWTIREFKICGEEQLDAHRLIRHFHYTVWPDHGVPETTQSLIQFVRTVRDYINRSPGAGPTVVHCSAGVGRTGTFIALDRILQQLDSKDSVDIYGAVHDLRLHRVHMVQTECQYVYLHQCVRDVLRARKLRSEQENPLFPIYENVNPEYHRDPVYSRH

SEQ ID NO: 395 - DNA, 5888 bp, Homo Sapiens
acttctgacagtggggaaagcagctgtgtgtgatagcttggaaggtttactgctgcctcaagtcctcttctctgcagttgaggtttcaggtttcaatcctcccaataccacaagacagagcacggggcggctgccgcctccgcctccgcgccttaacctaggcggcttgccgaagatctcagccccgcggccgcgcgctcgccctgccctagaccagggttgggcgcagcggcggaggtggcttctgggctgcgcgagctgggagagctgggaggcggcgatcgcagctgggccgggacttccttcctccaccgcacggcaacaaaacaaccctgcggcaggcactgagtgcttcgcagctgtctgggcgagaggcacagcgatgggctccgtgctgagcaccgacagcggcaaatcggcgcccgcctctgccaccgcgcgggccctggagcgcaggagggacccggagttgcccgtcacgtccttcgactgcgccgtgtgccttgaggtgttacaccagcctgtccggacccgctgtggccacgtattctgccgttcctgtattgctaccagtctaaagaacaacaagtggacctgtccttattgccgggcatatcttccttcagaaggagttccagcaactgatgtagccaaaagaatgaaatcagagtataagaactgcgctgagtgtgacaccctggtttgcctcagtgaaatgagggcacatattcggacttgtcagaagtacatagataagtatggaccactacaagaacttgaggagacagcagcaaggtgtgtatgtcccttttgtcagagggaactgtatgaagacagcttgctggatcattgtattactcatcacagatcggaacggaggcctgtgttctgtccactttgccgtttaatacccgatgagaatccaagcagcttcagtggcagtttaataagacatctgcaagttagtcacactttgttttatgatgatttcatagattttaatataattgaggaagctcttatccgaagagtcttagaccggtcacttcttgaatatgtgaatcactcgaacaccacataattttattaaaacgaagggaaaagggaccactgaattgcaccatttaagatgctgcttgaacaaatgggagggaagttgtcaatgattgatgggcaaaaatgtacaacacagttatgtgtttgtccatgtttattgttatagtgcatttaaaaactgctttaattttaatggtttaaatctgttttacatccttgagattcttacacatctaacaacaaaaaaaattatctacatcagtcattgttacatggaaaagacaggtggtaggcaagtaggtggaggatctcggtttgcaaattagataatactctgtgtataatgctacatatcaataactaccatcatggttaggcacgataactaatctttgttctgtgtaaaaaaatatggagagtgaaacaaagtgcagacattcaaagaaataagaaatctgctccaatgctcttgttctaatctctaataggttaacgttaataatcttgtatgggagttggaaaggaaaattttggaagtcaagaaagtccatttaggccggacgcggtggcttacgcttgtaatcccagcactttgggaggctgaagcaggcggatcacaaggtcaggagttcgagaccagcctggccaacactggtctctgtgaaactccgtctctactaaaaatacaaaaattagctggacgtgttggcgggcatctgtaataccagctacttgggaggctgaggcagaagaatcacttgaacccgggaggcagaggttacagtgagctgagatcgcaccagtacactccagcctgggtaacagagctagactccatctcaaaaaaaaaaaaaaaaaaaatccatttaaccaaattgtcttacataatactgtaacaaaacaaattttgtgttagaaaagtatacttaattctttgactttttataactgcatacataagaattcaatatttttcaaatatttatagcttatttagaaatatttctataatataagcaatttcttaaaaaccatcagatgatacttacagtataagtattcacatccagactttttagtagaaaaccctaagggctttgatatcttttttgattgtaacattttaaaaattatgaaataaaagtactgaaaaccagacacaaaatttatagctgaatgccttattataaggaaatactcttttaggactcagccagtcaccccacgtgtcctttttgtgtcctgtcacaattacaaccccacaaaagtaactgctagactgatttaaatggtaatcactttgttgcatttgattactgctgccacacctaaatgcatatatctatattttaatattatcaatttaaagttgttattaaatgtatattttattttacatctcttttttaatctagaagttcctccttctttccagttccttaaaatttacctggtgaagaacctgatcctaggacctatagagtttcccatactttgtattttgctgattgcacactcatggcacggttcagcacattgccctgtcctctcgatattagcacacagtgcaggttcaggcacattgaatttgagaagacttaggttcagtcctttggcaagactgtaaatcacggtgtctttctttccttcctccttcttctctctctctctctctctctctttccttttctttctctttttttcagagttgcactctgttgcccaggctggagtacagtggcacgatctcgactcactgcaacctccatctcccgggttcaagcagttctcctgtttcagcctcccaagtagctgggactacaggtgcacgccaccatgcccggctaatttttgtatttttagtagaggggtttcaccataatggtcaggctggtcttgaactcctgaactcaagtgatccaccagccttggcctcccaaaatgctgggattacaggcatgagccaccatgcccagctaatttttgtatttttagtagagacagggtttcaccataatagccaggctggtctcaaactccttaccttgtgatccgcccacctcagccttccaaagtgctgggattataggcgtgagccactgtgcccggcctacagggtttttatctaacctttctgttacaactgtacctctccttctgtactgaaagtcctggttttcaagaacacagggcacgatagaattagaacatcccacaattactcatttcttttatttatcttacacttacagctgtctcagaataacaatagaaatacaaccacaaataatatggcaattgaaacaattaaaaagttttcatttgcttttctcattctttcccaatttttttttttttttgagatggagtctcgcgctcttgttgcccaggctggagtgcaatggcacgatctcggctcactgcaacctctgcctcctggattcaagcaattctcctgcctcagcttcccgagtagctgggattataggcatgcgccaccacgccctgctaattttgtatttttagtagagtcaggatttctccacattggtcaggctggcctcaaactctcgacctcaggtgatccgcctgcctcggcctcccaaagtgctgggattacaggtgtgagccactgcgcccgacatcccaatttttaaaatagttatactatgtcaacattttcagaacatactggtatagcatactgtactttcttccttttatcccccatttattcttagttcttcaactatatatttaacacttgcccccagttttgttttgttttgttttgaggaggaatcttgctctgttgcccaggctggagtgcagtggtgtgatcttggctcactgcaacctccgcctcccgggttcaagtgattctcctgcctcagcctctcgagtagctgggattacaagtgggcaccaccacacccggctaattgttgtatttttagtagagatgggttttgccatgttggccaggctggttttgaactcctgacctcaagtgatccacctgtgttggcctcctaaagtactgggattacaggtgtgtgccaccgcgccaggcaattgcccccagtttttatttgatggctctgactgtttctcatatctgactctttaattatgaatccagggcatagattagtatctccatcttgtaaggatgcaaagaagccatgaaaataagtaatatcaactcctgaggataaaacgttacttgactagagttagctttttaattgtaatcatttataaacttctttgttccttacatataagcatagtcataaccatggtacccaaaattttctataagttattgtaactccttaaaggtcttgctacagttcttttatccagtacaaataattgggaaaatgtaaagctgaatgaaatctagtgagcctcatatcctcccttttagatattgattttaagtttgcttttcacagctgctaaaaagtaacaactgatttttagttccacaacctctctttcttcaatttagatggatcatacaataaagcaaaatctggctggttacagtggctcacacctataatcccagcactttgggaggctgaggtggagggtctcatgagcccaggagttcaagaccaacctgggcaatatagtgagactctttctatttaaacaaaaacaaaaacaaacaaacaaacaaacaaaaagctgggcatgatgcacacctttagtttcagctactaaggaggctgaggttggaggatcacttgagcctaggaggtcaacactgcagtgagctatgatcatgctactgccctccagcctgggcaacagagcaagaccctgtctccaaaaacataaataattaaatataaataaaaataaagcaaaatctgttgggaaacgagaaaaaggagaggaatttttcaggaataatcataaaaagaaatgatcatcagactgaaagtccagagcctgagaaatgaaaacatatttttaagcattggtgttgaccatgcagacaaacttttgttaattcagagcgatacaaaaggcactttgaatctataaaacttgaaaaagttaaaaattgtatgtcggataaagctttaagtcatctgtcactattaacctcagtgcagcaattctgactcctgtgcctggattccttttatgataattttgccacctacaggacagattaggtgctggtcgcctgaattattttgtgttctgaattattttgagctctaaaatggtaaagtacaaatactcattgttttactgtgcctttggccttttataaaaaggtatttataattcgttgataaaaaccaatatttgaagctgttgattaccaacaaaaaagtttcactctctttatagtgcttcaggatacaactttttcagggccttattagagaaaaactgattcacatgttattcttctaaagctaaattattaaaatgtaggttgaaagattggattgattgtgaatctacactaaagatatggttccaggcagacctccttagagacctccaggcagacctccttactgtcttcagtgatgtttaatttcattactgttactgggtgccaagtgtctttcatttggaagtgaacttactccagttattgaatgtttatcatatcataatttgcatttttccaacattgaaggtattttaaaaagtcactaagagattcattcttttattattcaactacaaaaaaatagtgtaatgatcagaatttaaaatgtgtgattctttttcttctgtaagtatgtattgctatgataaataaaaaatggcaggaccattgtttttattaaaat

SEQ ID NO: 396 - protein, 232 aa, Homo Sapiens
MGSVLSTDSGKSAPASATARALERRRDPELPVTSFDCAVCLEVLHQPVRTRCGHVFCRSCIATSLKNNKWTCPYCRAYLPSEGVPATDVAKRMKSEYKNCAECDTLVCLSEMRAHIRTCQKYIDKYGPLQELEETAARCVCPFCQRELYEDSLLDHCITHHRSERRPVFCPLCRLIPDENPSSFSGSLIRHLQVSHTLFYDDFIDFNIIEEALIRRVLDRSLLEYVNHSNTT

SEQ ID NO: 397 - DNA, 2104 bp, Homo Sapiens
tacctccaggagggctgctctgcccttccttcctctgttctttggccttatgttccccgccaccacagaccttcccccgccccacccctctgcagacttagccgtgcattgcaggcatggaggattaatcagtgacaggaagctgcgtctctcggagcggtgaccagctgtggtcaggagagcctcagcagggccagccccaggagtctttcccgattcttgctcactgctcacccacctgctgctgccatgaggcaccttggggccttcctcttccttctgggggtcctgggggccctcactgagatgtgtgaaataccagagatggacagccatctggtagagaagttgggccagcacctcttaccttggatggaccggctttccctggagcacttgaaccccagcatctatgtgggcctacgcctctccagtctgcaggctgggaccaaggaagacctctacctgcacagcctcaagcttggttaccagcagtgcctcctagggtctgccttcagcgaggatgacggtgactgccagggcaagccttccatgggccagctggccctctacctgctcgctctcagagccaactgtgagtttgtcaggggccacaagggggacaggctggtctcacagctcaaatggttcctggaggatgagaagagagccattgggcatgatcacaagggccacccccacactagctactaccagtatggcctgggcattctggccctgtgtctccaccagaagcgggtccatgacagcgtggtggacaaacttctgtatgctgtggaacctttccaccagggccaccattctgtggacacagcagccatggcaggcttggcattcacctgtctgaagcgctcaaacttcaaccctggtcggagacaacggatcaccatggccatcagaacagtgcgagaggagatcttgaaggcccagacccccgagggccactttgggaatgtctacagcaccccattggcattacagttcctcatgacttcccccatgcgtggggcagaactgggaacagcatgtctcaaggcgagggttgctttgctggccagtctgcaggatggagccttccagaatgctctcatgatttcccagctgctgcccgttctgaaccacaagacctacattgatctgatcttcccagactgtctggcaccacgagtcatgttggaaccagctgctgagaccattcctcagacccaagagatcatcagtgtcacgctgcaggtgcttagtctcttgccgccgtacagacagtccatctctgttctggccgggtccaccgtggaagatgtcctgaagaaggcccatgagttaggaggattcacatatgaaacacaggcctccttgtcaggcccctacttaacctccgtgatggggaaagcggccggagaaagggagttctggcagcttctccgagaccccaacaccccactgttgcaaggtattgctgactacagacccaaggatggagaaaccattgagctgaggctggttagctggtagcccctgagctccctcatcccagcagcctcgcacactccctaggcttctaccctccctcctgatgtccctggaacaggaactcgcctgaccctgctgccacctcctgtgcactttgagcaatgccccctgggatcaccccagccacaagcccttcgagggccctataccatggcccaccttggagcagagagccaagcatcttccctgggaagtctttctggccaagtctggccagcctggccctgcaggtctcccatgaaggccaccccatggtctgatgggcatgaagcatctcagactccttggcaaaaaacggagtccgcaggccgcaggtgttgtgaagaccactcgttctgtggttggggtcctgcaagaaggcctcctcagcccgggggctatggccctgaccccagctctccactctgctgttagagtggcagctccgagctggttgtggcacagtagctggggagacctcagcagggctgctcagtgcctgcctctgacaaaattaaagcattgatggcctgtggacctgcaaaaaaaaaaaaaaaaaaaaaaaaaaaaaaaa

SEQ ID NO: 398 - protein, 427 aa, Homo Sapiens
MRHLGAFLFLLGVLGALTEMCEIPEMDSHLVEKLGQHLLPWMDRLSLEHLNPSIYVGLRLSSLQAGTKEDLYLHSLKLGYQQCLLGSAFSEDDGDCQGKPSMGQLALYLLALRANCEFVRGHKGDRLVSQLKWFLEDEKRAIGHDHKGHPHTSYYQYGLGILALCLHQKRVHDSVVDKLLYAVEPFHQGHHSVDTAAMAGLAFTCLKRSNFNPGRRQRITMAIRTVREEILKAQTPEGHFGNVYSTPLALQFLMTSPMRGAELGTACLKARVALLASLQDGAFQNALMISQLLPVLNHKTYIDLIFPDCLAPRVMLEPAAETIPQTQEIISVTLQVLSLLPPYRQSISVLAGSTVEDVLKKAHELGGFTYETQASLSGPYLTSVMGKAAGEREFWQLLRDPNTPLLQGIADYRPKDGETIELRLVSW

SEQ ID NO: 399 - DNA, 4088 bp, Homo Sapiens
cacttcgcctcaagcgctggagtcgaccagaactctgcggctcggctgccggcaagacccggatagcggatttcgctcctggctgcggggcgcgcactcgcccgcccgcccgctcgctcgttcctcgcgcgggcactgggcatgcgcggcgcgcggttggcactggctgcgagcgggcgggcggctccagacttcacaggcagcagctagcgaggcggtctcgcccggcgcgaggccggcgctgtgctcgcctcggagatcgctgctctttagctgggtgcagaaggcggctccgcggctcgcggacgactggctgggcgcgaatcagattggggggctttctcccggtcccctcccacctcgtctgggctcgcggcgtctccggggaaagccgtggccccgagggcggatccgagaacacacaagtgaaagacacaatgaatggtcatatttctaatcatcccagtagttttggaatgtacccatctcagatgaatggctacggatcatcacctaccttttcccagacggacagagaacatggttcaaaaacaagtgcaaaggccctttatgaacaaaggaagaattatgcacgggacagtgtcagcagtgtgtcagatatatctcaataccgtgttgaacacttgactacctttgtcctggatcggaaagatgctatgatcactgttgatgatggaataaggaaattgaaattgcttgatgccaagggcaaagtgtggactcaagatatgattcttcaagtggatgacagagctgtgagcctgattgatttagaatcaaagaatgaactggagaattttcctttaaacacaatccagcactgccaagctgtgatgcattcatgcagctatgattcagttcttgcactggtgtgcaaagagccaacccagaacaagccagatcttcatctcttccagtgtgatgaggttaaggcaaacctaattagtgaagatattgaaagtgcaatcagtgacagtaaaggagggaaacagaagaggcggcccgacgccctgaggatgatttccaatgcagaccctagtataccgcctccacccagagctcctgcccctgcgccccctgggaccgtcacccaggtggatgttagaagtcgagtggcagcctggtctgcatgggcagccgaccaaggggactttgagaaaccaaggcagtatcatgagcaggaagaaacacctgagatgatggcagcccgcattgacagagatgtgcaaatcttaaaccacattttggatgacattgaattttttatcacaaaactccaaaaagcagcagaagcattttctgagctttctaaaaggaagaaaaacaagaaaggtaaaaggaaaggaccaggagagggtgttttaacgctgcgggcaaaacctccacctcctgatgaatttcttgactgtttccaaaagtttaaacacggatttaaccttctggccaaactgaagtctcatattcagaatcctagtgctgcagatttggttcactttttgtttactccattaaatatggtggtgcaggcaacaggaggtcctgaactagccagttcagtacttagtcccctattgaataaggacacaattgatttcttaaattatactgtcaatggtgatgaacggcagctgtggatgtcattgggaggaacttggatgaaagccagagcagagtggccaaaagaacagtttattccaccatatgttccacgattccgcaatggctgggagcccccaatgctgaactttatgggagccacaatggaacaagatctttatcaactggcagaatctgtggcaaatgtagcagaacatcagcgcaaacaggaaataaaaagattatccacagagcattccagtgtatcagagtatcatccagccgatggctatgcgttcagtagcaacatttacacaagaggatcccacctggaccaaggggaagctgctgttgcttttaagccaacttctaatcgccatatagatagaaattatgaaccactcaaaacacaacccaagaaatatgccaaatccaagtatgactttgtagcaaggaacaacagtgagctctcggttctaaaggatgatattttagagatacttgatgatcggaagcaatggtggaaagttcgaaatgcaagtggagactctggatttgtgccaaataacattttggatattgtgagacctccagaatctggattggggcgtgctgatccaccttatactcatactatacagaaacaaaggatggagtatggcccaagaccagctgatactccccctgctccatcacctcctccaacaccagctcctgttcctgttccccttcccccttccactccagcacctgttcctgtgtcaaaggtcccagcaaatataacacgtcaaaacagcagctccagtgacagtggtggcagtatcgtgcgagacagccagagacacaaacaacttccggtggaccgaaggaaatctcagatggaggaagtgcaagatgaactcatccacagactgaccattggtcggagtgccgctcagaagaaattccatgtgccacggcagaacgtgccagttatcaatatcacttacgactccacaccagaggatgtgaagacgtggttacagtcaaagggattcaaccctgtgactgtcaatagtcttggagtattaaatggtgcacaacttttctctctcaataaggatgaactgaggacagtctgccctgaaggggcgagagtctatagccaaatcactgtacaaaaagctgcattggaggatagcagtggcagctccgagttacaagaaattatgagaagacgacaggaaaaaatcagtgctgccgctagtgattcaggagtggaatcttttgatgaaggaagcagtcactaatttgtttgtttgtatttaaactccattgtttttggcattattccaacatgctttgttttaagaagccttgaagggaatgtcagattcatttttcttgatgtaatttatcaccataaaaaaaaaacccatgcaaacctgagtgagcacaggatttgcttctaggcccattatttttattaaaactgaaaaaatttaaactgaattttttgaccttggaaaatatttttcttactttaccaaggtgaagtttccttaattagactaattattttatccccatcccagggtataaacaggaattgttttgatagtggtggagttattcactgcaacaaagcaacaatgttgtccatgattcaaaatctaagcagtttcgattttgcctgtgaatatggtgtctgtcattcagggcatagctcactgtaggctagcctctgcttacttaagtctcttctctgacatactcaatggaagaatatttagatttatttaaagttcttaatgccaacagtttaaaaaaaaattaaaacatttgaatgaactgtaaagtacagccataccttggacatgcaaatataaatctatggagcattctcaagacagtttgtcatggctctgttgattgcaactccttgtatagcttgtattttgatttagtttatattctgcttattatgtatactgtgttcttatatatgagaaagcacaaatgcgaaagaggtcatgtcttctcaaaatctagcaaaggaagtagtctgcattggtgtgcattacagtattttgcttaatgaaagcctcagttctgaatgttgatatgagtagttaaaaggaagtggggccattttatgtgtttatctgtgtcaagtatttctggtaataagaagcacttaatttacacatattttaatcctgtgaaagattccacatagagaaaagaaagatacctaaccttcaacaaatgttatttttggaaacacaatttttgtcattaaatgttatattatttcacatatataaaacagatgttatgtaagaatgttgtatattttaacataaatcatttagagaaattatctagattcattaattttcatagtgcctttttcacatgagtcagctggaaagtctgcaataaacagtatttgctgtctgttaataaatggtttctgtctcattaaaaaa

SEQ ID NO: 400 - protein, 822 aa, Homo Sapiens
MNGHISNHPSSFGMYPSQMNGYGSSPTFSQTDREHGSKTSAKALYEQRKNYARDSVSSVSDISQYRVEHLTTFVLDRKDAMITVDDGIRKLKLLDAKGKVWTQDMILQVDDRAVSLIDLESKNELENFPLNTIQHCQAVMHSCSYDSVLALVCKEPTQNKPDLHLFQCDEVKANLISEDIESAISDSKGGKQKRRPDALRMISNADPSIPPPPRAPAPAPPGTVTQVDVRSRVAAWSAWAADQGDFEKPRQYHEQEETPEMMAARIDRDVQILNHILDDIEFFITKLQKAAEAFSELSKRKKNKKGKRKGPGEGVLTLRAKPPPPDEFLDCFQKFKHGFNLLAKLKSHIQNPSAADLVHFLFTPLNMVVQATGGPELASSVLSPLLNKDTIDFLNYTVNGDERQLWMSLGGTWMKARAEWPKEQFIPPYVPRFRNGWEPPMLNFMGATMEQDLYQLAESVANVAEHQRKQEIKRLSTEHSSVSEYHPADGYAFSSNIYTRGSHLDQGEAAVAFKPTSNRHIDRNYEPLKTQPKKYAKSKYDFVARNNSELSVLKDDILEILDDRKQWWKVRNASGDSGFVPNNILDIVRPPESGLGRADPPYTHTIQKQRMEYGPRPADTPPAPSPPPTPAPVPVPLPPSTPAPVPVSKVPANITRQNSSSSDSGGSIVRDSQRHKQLPVDRRKSQMEEVQDELIHRLTIGRSAAQKKFHVPRQNVPVINITYDSTPEDVKTWLQSKGFNPVTVNSLGVLNGAQLFSLNKDELRTVCPEGARVYSQITVQKAALEDSSGSSELQEIMRRRQEKISAAASDSGVESFDEGSSH

SEQ ID NO: 401 - DNA, 8245 bp, Homo Sapiens
ggaggaagaaaactcaagtgaaactgactctgctagaacagtgccgtgcttttccacagaaggttagaccctgaaagagatggctcagcaccacctatggatcttgctcctttgcctgcaaacctggccggaagcagctggaaaagactcagaaatcttcacagtgaatgggattctgggagagtcagtcactttccctgtaaatatccaagaaccacggcaagttaaaatcattgcttggacttctaaaacatctgttgcttatgtaacaccaggagactcagaaacagcacccgtagttactgtgacccacagaaattattatgaacggatacatgccttaggtccgaactacaatctggtcattagcgatctgaggatggaagacgcaggagactacaaagcagacataaatacacaggctgatccctacaccaccaccaagcgctacaacctgcaaatctatcgtcggcttgggaaaccaaaaattacacagagtttaatggcatctgtgaacagcacctgtaatgtcacactgacatgctctgtagagaaagaagaaaagaatgtgacatacaattggagtcccctgggagaagagggtaatgtccttcaaatcttccagactcctgaggaccaagagctgacttacacgtgtacagcccagaaccctgtcagcaacaattctgactccatctctgcccggcagctctgtgcagacatcgcaatgggcttccgtactcaccacaccgggttgctgagcgtgctggctatgttctttctgcttgttctcattctgtcttcagtgtttttgttccgtttgttcaagagaagacaagatgctgcctcaaagaaaaccatatacacatatatcatggcttcaaggaacacccagccagcagagtccagaatctatgatgaaatcctgcagtccaaggtgcttccctccaaggaagagccagtgaacacagtttattccgaagtgcagtttgctgataagatggggaaagccagcacacaggacagtaaacctcctgggacttcaagctatgaaattgtgatctaggctgctgggctgaattctccctctggaaactgagttacaaccaccaatactggcaggttccctggatccagatcttctctgcccaactcttactgggagattgcaaactgccacatctcagcctgtaagcaaagcaggaaaccttctgctgggcatagcttgtgcctaaatggacaaatggatgcatacccttcctgaaatgactcccttctgaatgaatgacaaagcaggttacctagtatagttttcccaaacttcttcccatcatagcacatgtagaaaataatatttttatggcacactgggataaacaagcaagattgctcacttctggaagctgcatatgactagaggcctcttgtgactggaggtaacaaccctgcccagtaactgtgggagaaggggatcaatattttgcacacctgtaataggccatggcacaccagccaagatgctctgctcacagtcagtatgtgtgaagatccctggtgcgtggccttcaccacgcatcttgagcaaattaggaaaatgtacccttcgcttgaggcagatgcagcccttcccccgagtgcatggcttggagagcagaatgtgggctgcatataagcacactcatccctttgtctgggaatctttgtgcagggcataacaggcttagtaagtccaaacacagatgacagtgctgtgtgggtctctgtcagagttgtggctctcagccatgtagacacactctccaaatggagtgttggaaaatgttctttctgcagggtctagagactgctgggacacttttcttggagtgctacttcagaagccttataggattttctttctggccaagatttccttctgtatcactccaagcagcctcagcagaagaagcagccatgcccagtattcccactctccaaaaggaactgaccagcttatatttctcacacttctggggaactgggtataatccaaccatcaaaatagaagaccttgcaagaagcagagtcattctccagaaggaacttgggagatgatggtgcagatgatgaaactgggttcatcccagttccaaagactcagagaactagagtttaagctgaggcagagtgccgccaccctggcatgccccacaaacagatcaccagccagcttacacaggcattaactctcctcaatgaggaagaatcattcacaactgagcaagacattcatatgatcatttaaggaagtgtttcccttatgtgttagcaagtataatcggctaactcctaaatcccaatgaatagtcctaggctggacagcaatgggctgcaattaggcagataaagacatcagtcccagtaaatgaatccatagactcatctagcaccaactaccattagcactatgttaggagctgcaaggccccaaagtagaagatgtgcataatgtctgctcttgtgtagctcaggagacaattccagcacagacactacagttaacgctgaactgcagctgcaagtaatagcatgaacagtcagaaaaataccttatgagggggcagggctgaagctgggccttgaaggatggatgaaatttggatagagaatgaggaagacagagggcctccaagtgagagaagcatgaaaaatgagcaggggcctggatcagtggggtgtattcagagcacctctccagatgcaccatgcatgctcacagtcccttgcctatgtgtggcagagtgtcccagccagatgtgtgccctcaccccatgtccatttacatgtccttcaatgcccacctcaaaaggtacctcttctgtaaagctttccctggtatcaggaatcaaaattaatcagggatcttttcacactgctgttttttcctctttggtccttctatcactaaaactcatctcattcagccttacagcataactaattatttgttttcctcactacattgtacatgtgggaattacagataaacggaagccggctggggtggtggctcacgcctgtaatcccaacactttgggaggccaaggcaggcggatcacctgaggtcaggagttcgagattagtctggccaacatggtgaaaccccatctctactaaaaatacgaaattagccaggtgtggtggcacacatctgtagtcccagctactctggaggctgagacaggagaatcgcttgaacccaggaagtggaggttgcagtgagctgagatcacaccactgcactccagcctgggagagacagagtgagactccatctcgaaaaaaaaaaaaagatagaagccaataagcatggtgcaatcaaattctggcaagcattaaatatcaggatgcagctgggcacggtggctcacgcctgtaatcccagcactttgggaggccaaggtgggcggatcacttgaggtcaggaatttgagaggatcctggccagcatggcaaaaccccatctgtacttaaaatacaaaaaaattagctgggcgtggtggtgcacacctgtaatcccagctacttgggaggctgaggtgggagaattgcttgaacctgggaggtggaggttgcagtgagctgagatcctgccactgcactccaggctgggcaacagagtgagaccatgtctcaaaaaataaaaataaaataaaataatatcaggatgcatacatcagaggctgttcctagtgtaaaggcactttggagggagaagactttcagagttaggcagaccaactaagaggtcagctgaagcacctaaccagttgtaaggaggtgaaagacagcaccccaagaagagacgtgcaggaaggaggaaagaggcttggtcataaaggatggaggaattccaaagtgacactgaacaggctgcgtttatcctaaaataaaaccactcctcactctgtggatgcgttgaagactcattcccaaacatctttattctctaacttgccctcttcctcttcctaatatgctcactcaagtaaaattactagtgtcctaatgcccctatgcatattgtcaaaaataaaaatcagaagcaggttagatctgttaggtcttccagaagagcaaacctgggatgaagccagagcccaggaattctgaaggtagcctttggactcaggacaccctactcttgtctctcctctcagtttctctgctatgaatctcctgattcatgaacacgttatctgttcacccttctctctaggtcttagttcttagattttccttctgtaaaatgcatgtgatcttattttcccctccacaactttccagatgaactagactgtgaccaagaggtctataaaatcaaagcatcatggaacaggatcttgtatcagaccaaagtgtgccagtttttaaaaatgtgcatcaaaatggaagtctcagagacagagccctctggtggaaagttctagtaggttaggacagtcctgcctgcagacaccttgggctttactgagggactcaactgagaaaatgaggaatgttgcagctcatgattcttagaagaagaaagtgaagcttgtttaaaatatgatttaaaaaatctgtagaacactgtaaactacacaggctatgagggaatagcctggttgggccagcttggaaatcgggcacaggcaggaaggggcctgtctggtttgggccgtgtccacagagagcacttcttaggtcctgcctggagagaaggaatggctgggctatattttcttccagactcattatttttcttctgtttgacttttctctgaatttcccttgatttgtataaattttctcaataattagtgacagtgtctactgattgtaaaatgaagcttgaaggccaggcgcagtggctcatgcctgtaatcctagaattttgggaggccaaggtgggtggatcacaaggagttcgagaccagcctggccaaggttgtgaaaccgcgtctctactaaaaatacaaaaaaattagccgggcatggtggcacgtgcctgtagtcccagctactcaggaagctgaggcaacagaatcacttgaacctgggaggtggaggttgcagtgagccgagatcacgccactgcactccagcctgggcgagagagtgagactccgtctcaaaaaaaaaaaaaaaaaaaaaagtttgaagaacaaagacaataagaggaaatataatgagtggtcataaatgtgggctctgacagtagagtgcctgggtctgcatcctggtttcttagtcatgtgaccttaggcaagttactttaacctcgctgtacctcaggttgtccatctgtaaaatggggataataatagtgcctaccttttaaggttgatgtggggattaaatgaggtgttgctcatacaggaatgtgcctgtgcatggcaaagttcgggaaattttttataagctgttctaggcctgaaatcttcagaagatgctaatctaaattcatgaaataagcttcttacaacagaaatgctgctagtattatgcaaaattaatgttgtatatcaaacttttaactctcatccctccttattcagatatattttgttataagcaatgtttgttcccctcgttattataccacagtctacttacctgatgctatatctgcctccccagttagactgagagaacaggggatatacctaaataataataataataataataataataaataataatggagagctccttgaagatagggagcctgtaagaatcattgagggcttattttgtataccaactgctaaactagatgcttcatacattgttgtcaatactcatgacagccttgtaaagtagaaattaattcttccagttaacactaaggctgacatatgaataccttggcaaatctggaaagctgggaagacagtatttgaattcaagacttcttgtcaccaagggccatgcacttgtactctgccatgtggcccttttttacctcctgtggattctccctacctggtacttggccttaggtgtacacacacctggcactttgcttgacacataataggtggaccacaaatatctactaaatgaatatttgcatatagtaatattttaaggtactaaaagcagctcaaagtaaatatattaatatattaattccattgctatctggataaccactcaactttcctgctgaaaatgcccatttaattaaagaaggttggatagagctctctatatgcattttggacaggcaggggtttcaggtcataaacattctgatgagttaatataaaataagagaaactgtaaatttccactactaaaaatcacaaaaataacagaaacaaaagaagagataagaatttggggaattgtgctgaacaatttagtggttaaaaaaaacaactgtgcatgtttagacttaaataagcccccatccaagtgtgaggggtccagtaatttttcaaaacatatgaaagtgttaatacatttcgacaaaggaccattaaaaaagtcctgaattctgacttgagggaggaaagtaatgactaatacattctctagagacttgcagactttgggaattcataaaggaatggatgataattattaactgttgctggctgattgcccagacagttctcaacagccctgtacaagtctctgggtttgggatggatcaattctgagactggaaaatggccaaatctttgcaaatgagaaatatttttcttataagttcttattgtaggcaaataattacatagattattcatcagagaatttttaaatgctcataatctcaactctttcatttacaacttgtatttccaatagtttatgggtcatctctgcatagatgtcagaagtcacctcaagtttagcgtgtccaaaatctaactcacaggtctgtttctgacctcccaacttgctttccttgtgtttttcctatgctaatgatccaccataatcaaaataattaacatttatccagtgcctactatgtactattccctgtcctgttttacatttactcatttaaagtccataagaaacattaaatctcatctgccttctgaagaagatacaaccatgctctcttttacaaagtaggaaactgggtcacagaaaggtgaagtctttaaggctgaatcacagtagctcatcctagtaaatagaaaagccaggattcaactccaggggctgggtgcagaactgctattcttcactgcttcaccaatcagcagctacccaaggcagaaaactttttcatccttggctccttcattctccctgtcaccccagatcccctctacatctagtcagagaataggtcctgtcaattccaacttctctatatggctcctctcaggcatgtgcccttaattggcctaattctctaatacaccttccctctacatgctcactccctcagatcattgctttatcacgtgttacctgggttgctattacataaagagcaatctttctaaaatgaggatcttatcacttcacttccacactaaaatgtttttcctggggaaccacactccttagcaatctgacccatcagaccttccaggctgtctcctgcctgctccctaaggctccagccacacagaattatcatgggcccacacacccaccaaatcctcccatgcctttgcccatgttgtctgggatgcccttctctcccttctgtctacatcaagcatcagactgaatatccctcttgtgcggccttctaaaacctcccgtccaaagcgaaatatattgccctctatttatacttttacagcatttggcacacaagtacagagtagtagctttttatcacattctctgataattatatagatatggtatttcttagctctctctccaactggctaataagttgctttttgtctgagtgcctaattttgtgttttgtgtctgagtgcctcagttcctcaaaaaaaggttttttgattagttcattattcatttgaacatggaaattatgctcactagtggcaaatgccactaaccgtattccagaagctaggtgtcatgtttgcaataagatatattatcccttctacaagtcaccttttatttcaggcatttgtaaatgcccattaataaagtatggttcataaattttaccttgtaagtgcctaagaaatgagactacaagctccatttcagcaggacacaataaatattattttataatgcatctaaaaaaaaaaaaaaaaaa

SEQ ID NO: 402 - protein, 328 aa, Homo Sapiens
MAQHHLWILLLCLQTWPEAAGKDSEIFTVNGILGESVTFPVNIQEPRQVKIIAWTSKTSVAYVTPGDSETAPVVTVTHRNYYERIHALGPNYNLVISDLRMEDAGDYKADINTQADPYTTTKRYNLQIYRRLGKPKITQSLMASVNSTCNVTLTCSVEKEEKNVTYNWSPLGEEGNVLQIFQTPEDQELTYTCTAQNPVSNNSDSISARQLCADIAMGFRTHHTGLLSVLAMFFLLVLILSSVFLFRLFKRRQDAASKKTIYTYIMASRNTQPAESRIYDEILQSKVLPSKEEPVNTVYSEVQFADKMGKASTQDSKPPGTSSYEIVI

SEQ ID NO: 403 - DNA, 3863 bp, Homo Sapiens
atttaagagccaactgtcttgtctttcccgagtccgtttgaggaagtccccgaggcgcacagagcaagcccacgcgagggcacctctggaggggagcgcctgcaggaccttgtaaagtcaaaaatgtcagaaacttccaggaccgcctttggaggcagaagagcagttccacccaataactctaatgcagcggaagatgacctgcccacagtggagcttcagggcgtggtgccccggggcgtcaacctgcaagagtttcttaatgtcacgagcgttcacctgttcaaggagagatgggacactaacaaggtggaccaccacactgacaagtatgaaaacaacaagctgattgtccgcagagggcagtctttctatgtgcagattgacttcagtcgtccatatgaccccagaagggatctcttcagggtggaatacgtcattggtcgctacccacaggagaacaagggaacctacatcccagtgcctatagtctcagagttacaaagtggaaagtggggggccaagattgtcatgagagaggacaggtctgtgcggctgtccatccagtcttcccccaaatgtattgtggggaaattccgcatgtatgttgctgtctggactccctatggcgtacttcgaaccagtcgaaacccagaaacagacacgtacattctcttcaatccttggtgtgaagatgatgctgtgtatctggacaatgagaaagaaagagaagagtatgtcctgaatgacatcggggtaattttttatggagaggtcaatgacatcaagaccagaagctggagctatggtcagtttgaagatggcatcctggacacttgcctgtatgtgatggacagagcacaaatggacctctctggaagagggaatcccatcaaagtcagccgtgtggggtctgcaatggtgaatgccaaagatgacgaaggtgtcctcgttggatcctgggacaatatctatgcctatggcgtccccccatcggcctggactggaagcgttgacattctattggaataccggagctctgagaatccagtccggtatggccaatgctgggtttttgctggtgtctttaacacatttttacgatgccttggaataccagcaagaattgttaccaattatttctctgcccatgataatgatgccaatttgcaaatggacatcttcctggaagaagatgggaacgtgaattccaaactcaccaaggattcagtgtggaactaccactgctggaatgaagcatggatgacaaggcctgaccttcctgttggatttggaggctggcaagctgtggacagcaccccccaggaaaatagcgatggcatgtatcggtgtggccccgcctcggttcaagccatcaagcacggccatgtctgcttccaatttgatgcaccttttgtttttgcagaggtcaacagcgacctcatttacattacagctaagaaagatggcactcatgtggtggaaaatgtggatgccacccacattgggaaattaattgtgaccaaacaaattggaggagatggcatgatggatattactgatacttacaaattccaagaaggtcaagaagaagagagattggccctagaaactgccctgatgtacggagctaaaaagcccctcaacacagaaggtgtcatgaaatcaaggtccaacgttgacatggactttgaagtggaaaatgctgtgctgggaaaagacttcaagctctccatcaccttccggaacaacagccacaaccgttacaccatcacagcttatctctcagccaacatcaccttctacaccggggtcccgaaggcagaattcaagaaggagacgttcgacgtgacgctggagcccttgtccttcaagaaagaggcggtgctgatccaagccggcgagtacatgggtcagctgctggaacaagcgtccctgcacttctttgtcacagctcgcatcaatgagaccagggatgttctggccaagcaaaagtccaccgtgctaaccatccctgagatcatcatcaaggtccgtggcactcaggtagttggttctgacatgactgtgacagttgagtttaccaatcctttaaaagaaaccctgcgaaatgtctgggtacacctggatggtcctggagtaacaagaccaatgaagaagatgttccgtgaaatccggcccaactccaccgtgcagtgggaagaagtgtgccggccctgggtctctgggcatcggaagctgatagccagcatgagcagtgactccctgagacatgtgtatggcgagctggacgtgcagattcaaagacgaccttccatgtgaatgcacaggaagctgagatgaaccctggcatttggcctcttgtagtcttggctaaggaaattctaacgcaaaaatagctcttgctttgacttaggtgtgaagacccagacaggactgcagagggctccagagtggagatcccacatatttcaaaaacatgcttttccaaacccaggctattcggcaaggaagttagtttttaatctctccaccttccaaagagtgctaagcattagctttaattaagctctcatagctcataagagtaacagtcatcatttatcatcacaaatggctacatctccaaatatcagtgggctctcttaccagggagatttgctcaatacctggcctcatttaaaacaagacttcagattccccactcagccttttgggaataatagcacatgatttgggctctagaattccagtcccctttctcggggtcaggttctaccctccatgtgagaatatttttcccaggactagagcacaacataatttttatttttggcaaagccagaaaaagatctttcattttgcacctgcagccaagcaaatgcctgccaaattttagatttaccttgttagaagaggtggccccatattaacaaattgcatttgtgggaaacttaaccacctacaaggagataagaaagcaggtgcaacactcaagtctattgaataatgtagttttgtgatgcattttatagaatgtgtcacactgtggcctgatcagcaggagccaatatcccttactttaaccctttctgggatgcaatactaggaagtaaagtgaagaatttatctctttagttagtgattatatttcacccatctctcaggaatcatctcctttgcagaatgatgcaggttcaggtcccctttcagagatataataagcccaacaagttgaagaagctggcggatctagtgaccagatatatagaaggactgcagccactgattctctcttgtccttcacatcacccatgttgagacctcagcttggcactcaggtgctgaagggtaatatggactcagccttgcaaatagccagtgctagttctgacccaaccacagaggatgctgacatcatttgtattatgttccaaggctactacagagaaggctgcctgctatgtatttgcaaggctgatttatggtcagaatttccctctgatatgtctagggtgtgatttaggtcagtagactgtgattcttagcaaaaaatgaacagtgataagtatactgggggcaaaatcagaatggaatgctctggtctatataaccacatttctaagcctttgagactgttcctgagccttcagcactaacctatgagggtgagctggtcccctctatatatacatcatacttaactttactaagtaatctcacagcatttgccaagtctcccaatatccaattttaaaatgaaatgcattttgctagacagttaaactggcttaacttagtatattattattaattacaatgtaatagaagcttaaaataaagttaaactgattatatttgca

SEQ ID NO: 404 - protein, 732 aa, Homo Sapiens
MSETSRTAFGGRRAVPPNNSNAAEDDLPTVELQGVVPRGVNLQEFLNVTSVHLFKERWDTNKVDHHTDKYENNKLIVRRGQSFYVQIDFSRPYDPRRDLFRVEYVIGRYPQENKGTYIPVPIVSELQSGKWGAKIVMREDRSVRLSIQSSPKCIVGKFRMYVAVWTPYGVLRTSRNPETDTYILFNPWCEDDAVYLDNEKEREEYVLNDIGVIFYGEVNDIKTRSWSYGQFEDGILDTCLYVMDRAQMDLSGRGNPIKVSRVGSAMVNAKDDEGVLVGSWDNIYAYGVPPSAWTGSVDILLEYRSSENPVRYGQCWVFAGVFNTFLRCLGIPARIVTNYFSAHDNDANLQMDIFLEEDGNVNSKLTKDSVWNYHCWNEAWMTRPDLPVGFGGWQAVDSTPQENSDGMYRCGPASVQAIKHGHVCFQFDAPFVFAEVNSDLIYITAKKDGTHVVENVDATHIGKLIVTKQIGGDGMMDITDTYKFQEGQEEERLALETALMYGAKKPLNTEGVMKSRSNVDMDFEVENAVLGKDFKLSITFRNNSHNRYTITAYLSANITFYTGVPKAEFKKETFDVTLEPLSFKKEAVLIQAGEYMGQLLEQASLHFFVTARINETRDVLAKQKSTVLTIPEIIIKVRGTQVVGSDMTVTVEFTNPLKETLRNVWVHLDGPGVTRPMKKMFREIRPNSTVQWEEVCRPWVSGHRKLIASMSSDSLRHVYGELDVQIQRRPSM

SEQ ID NO: 405 - DNA, 2437 bp, Homo Sapiens
gcaggagcacgtggagaggccgagtagccacagcggcagctccagcccggcccggcagcgacatggaagatatacaaacaaatgcggaactgaaaagcactcaggagcagtctgtgcccgcagaaagtgcagcggttttgaatgactacagtttaaccaaatctcatgaaatggaaaatgtggacagtggagaaggcccagccaatgaagatgaagacataggagatgattcaatgaaagtgaaagatgaatacagtgaaagagatgagaatgttttaaagtcagaacccatgggaaatgcagaagagcctgaaatcccttacagctattcaagagaatataatgaatatgaaaacattaagttggagagacatgttgtctcattcgatagtagcaggccaaccagtggaaagatgaactgcgatgtgtgtggattatcctgcatcagcttcaatgtcttaatggttcataagcgaagccatactggtgaacgcccattccagtgtaatcagtgtggggcatcttttactcagaaaggtaacctcctccgccacattaaactgcacacaggggaaaaaccttttaagtgtcacctctgcaactatgcatgccaaagaagagatgcgctcacggggcatcttaggacacattctgtggagaaaccctacaaatgtgagttttgtggaaggagttacaagcagagaagttcccttgaggagcacaaggagcgctgccgtacatttcttcagagcactgacccaggggacactgcaagtgcggaggcaagacacatcaaagcagagatgggaagtgaaagagctctcgtactggacagattagcaagcaatgtggcaaaacgaaaaagctcaatgcctcagaaattcattggtgagaagcgccactgctttgatgtcaactataattcaagttacatgtatgagaaagagagtgagctcatacagacccgcatgatggaccaagccatcaataacgccatcagctatcttggcgccgaagccctgcgccccttggtccagacaccgcctgctcccacctcggagatggttccagttatcagcagcatgtatcccatagccctcacccgggctgagatgtcaaacggtgcccctcaagagctggaaaagaaaagcatccaccttccagagaagagcgtgccttctgagagaggcctctctcccaacaatagtggccacgactccacggacactgacagcaaccatgaagaacgccagaatcacatctatcagcaaaatcacatggtcctgtctcgggcccgcaatgggatgccacttctgaaggaggttccccgctcttacgaactcctcaagcccccgcccatctgcccaagagactccgtcaaagtgatcaacaaggaaggggaggtgatggatgtgtatcggtgtgaccactgccgcgtcctcttcctggactatgtgatgttcacgattcacatgggctgccacggcttccgtgaccctttcgagtgtaacatgtgtggatatcgaagccatgatcggtatgagttctcgtctcacatagccagaggagaacacagagccctgctgaagtgaatatctggtctcagggattgctcctatgtattcagcatcgtttctaaaaaccaatgacctcgcctaacagattgctctcaaaacatactcagttccaaacttcttttcataccatttttagctgtgttcacaggggtagccagggaaacactgtcttccttcagaaattattcgcaggtctagcatattattacttttgtgaaacctttgttttcccatcagggacttgaattttatggaatttaaaagccaaaaaggtatttggtcattatcttctacagcagtggaatgagtggtcccggagatgtgctatatgaaacattctttctgagatatatcaaccacacgtggaaaagcctttcagtcatacatgcaaatccacaaagaggaagagctgaccagctgaccttgctgggaagcctcacccttctgcccttcacaggctgaagggttaagatctaatctccctaatctaaatgacagtctaagagtaagtaaaagaacagccataaaataagtatctgttacgagtaactgaagaccccattctccaagcatcagatccatttcctatcacaacatttttaaaaaatgtcatctgatggcacttctgcttctgtcctttaccttcccatctccagtgaaaagctgagctgctttgggctaaaccagttgtctatagaagaaaatctatgccagaagaactcatggttttaaatatagaccatcatcgaaactccagaaatttatccactgtggatgatgacatcgctttcctttggtcaaggttggcagagcaagggtataaagggggaaattgtttggcagcaccaacagaaaacaaa

SEQ ID NO: 406 - protein, 509 aa, Homo Sapiens
MEDIQTNAELKSTQEQSVPAESAAVLNDYSLTKSHEMENVDSGEGPANEDEDIGDDSMKVKDEYSERDENVLKSEPMGNAEEPEIPYSYSREYNEYENIKLERHVVSFDSSRPTSGKMNCDVCGLSCISFNVLMVHKRSHTGERPFQCNQCGASFTQKGNLLRHIKLHTGEKPFKCHLCNYACQRRDALTGHLRTHSVEKPYKCEFCGRSYKQRSSLEEHKERCRTFLQSTDPGDTASAEARHIKAEMGSERALVLDRLASNVAKRKSSMPQKFIGEKRHCFDVNYNSSYMYEKESELIQTRMMDQAINNAISYLGAEALRPLVQTPPAPTSEMVPVISSMYPIALTRAEMSNGAPQELEKKSIHLPEKSVPSERGLSPNNSGHDSTDTDSNHEERQNHIYQQNHMVLSRARNGMPLLKEVPRSYELLKPPPICPRDSVKVINKEGEVMDVYRCDHCRVLFLDYVMFTIHMGCHGFRDPFECNMCGYRSHDRYEFSSHIARGEHRALLK

SEQ ID NO: 407 - DNA, 4660 bp, Homo Sapiens
aggttctctgctctggacttgggaggctccgttgcctgctcccggagggagacgcgctgccgaggagaacccagcgggagaacatttcaggataggaataggccaagtgctgagaagatgagtcttaggattgatgtggatacaaactttcctgagtgtgttgtagatgcaggaaaagtcacccttgggactcagcagaggcaggagatggaccctcgcctgcgggagaaacagaatgaaatcatcctgcgagcagtatgtgctctgctgaattctggtgggggcataatcaaggctgagattgagaacaaaggctacaattatgaacgtcatggagtaggattggatgtgcctccaattttcagaagccatttagataagatgcagaaggaaaaccactttttgatttttgtgaaatcatggaacacagaggctggtgtgccacttgctaccttatgctccaatttgtaccacagagagagaacatccaccgatgtcatggattctcaggaagctctggcattcctcaaatgcaggactcagactccaacgaatattaatgtttccaattcattaggtccacaggcagctcagggtagtgtacaatatgaaggtaacataaatgtgtcagctgctgctttatttgatagaaagcggcttcagtatctggaaaaactcaaccttcctgagtccacacatgttgaatttgtaatgttctcgacagacgtgtcacactgtgttaaagacagacttccgaagtgtgtttctgcatttgcaaatactgaaggaggatatgtattttttggtgtgcatgatgagacttgtcaagtgattggatgtgaaaaagagaaaatagaccttacgagcttgagggcttctattgatggctgtattaagaagctacctgtccatcatttctgcacacagaggcctgagataaaatatgtccttaacttccttgaagtgcatgataagggggccctccgtggatatgtctgtgcaatcaaggtggagaaattctgctgtgcggtgtttgccaaagtgcctagttcctggcaggtgaaggacaaccgtgtgagacaattgcccacaagagaatggactgcttggatgatggaagctgacccagacctttccaggtgtcctgagatggttctccagttgagtttgtcatctgccacgccccgcagcaagcctgtgtgcattcataagaattcggaatgtctgaaagagcagcagaaacgctactttccagtattttcagacagagtggtatatactccagaaagcctctacaaggaactcttctcacaacataaaggactcagagacttaataaatacagaaatgcgccctttctctcaaggaatattgattttttctcaaagctgggctgtggatttaggtctgcaagagaagcagggagtcatctgtgatgctcttctaatttcccagaacaacacccctattctctacaccatcttcagcaagtgggatgcggggtgcaagggctattctatgatagttgcctattctttgaagcagaagctggtgaacaaaggcggctacactgggaggttatgcatcacccccttggtctgtgtgctgaattctgatagaaaagcacagagcgtttacagttcgtatttacaaatttaccctgaatcctataacttcatgaccccccagcacatggaagccctgttacagtccctcgtgatagtcttgcttgggttcaaatccttcttaagtgaagagctgggctctgaggttttgaacctactgacaaataaacagtatgagttgctttcaaagaaccttcgcaagaccagagagttgtttgttcatggcttacctggatcagggaagactatcttggctcttaggatcatggagaagatcaggaatgtgtttcactgtgaaccggctaacattctctacatctgtgaaaaccagcccctgaagaagttggtgagtttcagcaagaaaaacatctgccagccagtgacccggaaaaccttcatgaaaaacaactttgaacacatccagcacattatcattgatgacgctcagaatttccgtactgaagatggggactggtatgggaaagcaaagttcatcactcagacagcaagggatggcccaggagttctctggatctttctggactactttcagacctatcacttgagttgcagtggcctcccccctccctcagaccagtatccaagagaagagatcaacagagtggtccgcaatgcaggtccaatagctaattacctacaacaagtaatgcaggaagcccgacaaaatcctccacctaacctcccccctgggtccctggtgatgctctatgaacctaaatgggctcaaggtgtcccaggcaacttagagattattgaagacttgaacttggaggagatactgatctatgtagcgaataaatgccgttttctcttgcggaatggttattctccgaaggatattgctgtgcttttcaccaaagcaagtgaagtggaaaaatataaagacaggcttctaacagcaatgaggaagagaaaactgtctcagctccatgaggagtctgatctgttactacagatcggtgatgcgtcggatgttctaaccgatcacattgtgttggacagtgtctgtcgattttcaggcctggaaagaaatatcgtgtttggaatcaatccaggagtagccccaccggctggggcctacaatcttctgctctgtttggcttctagggcaaaaagacatctgtatattctgaaggcttctgtgtgacaggaaacccaagcctaagaaacaattaagtggttctcatctctaattaactgtgaaaccatttaatccaaacatgtaagcacacactcacttattaagtcacatacttttctaggtgctggggattgagaacgaatcgatgtaagattcctcctttagggcagagacagaccactgacaaatacacagatagacaaggaatttcccatggtaaaaagggatatcagtaattagaggaccgtgagactcagagatgtgtgtgtgtgtgtgtgtgtgtgtgtgtgtgtgtgcgcgcgcgcacgtgcacatgtgtgtaggtagatggagggggtgattattttgggtggtcagggaagtgctcagtgagggaagaacttgtcatgagaatctctgagcgtgccaggcagactcggatatttttataaatttttaacatggccacttgcagaagagcttgaatgggacgtgcagcgagaatgtgaaggatggagcaggtagctcatctggccttgtaggtgccgggaacgggcaagacatgttttgaaatgtaagatcacagactgttttttgcaagaccacattatattactttattattttctgctttttcttttaacgacattagtgtttttgatcactatattttaaaatgctttttgtgagccttttggttatgtggaatctgttccttagctctgattttttattcttatggagcgtcttaggttactacatgaaggtaagactgccacagtcccccagggaggcacactgtgttttactgattgatttgaagatgatagagagcctagggggatgagtctattggactcaaaggttacattttgtttttccatttaatttaataatcaacaaaacgacaaagtcagtttaatatctttcttctgctgagtcttcaggatgttagctagtctttcaaaagccattgctacaaaagtgcaaatttctcatttcctgtgggtctctagaaactctctcaatatttaaagccaaacaaatccatcttttctgagagacagaaactaaaaaattcagagttaattcactattaaaaacagcaaggccctgctatttcccaagaataaagaaatttaaaattctcattgtaagaagtatgaacttgaagctagaattggtttatttctggcagctacttacaatattaagaactttactttttaaatttgagacaatttcacaggaaagcaagaaattagtctattgtgaaatgtttttacaactaacttggaatatactgcaaatcactagtaagtagagacacatttaagataaaatgattaataaaacaattggtaattctgaataaggatctgaataaatccagatcacagactgttcctttaccaatatgtaaaagaatgtgcaaaattagtaaaaatatacccaaaaatttaccagcaacagagaagcaaagaatggagttcaaccttacactataaacatctaatagatatgtatgaaaatttaaaaactagaaaaggttgggcatggtggctcatgcttgtgatcccaggactttaggaggccaaggtgggaggattgtttgagcccaggagttcaagaccagcttgagcaatatagtgagaccctgtctctacaaaaacaaacaaacaaacaaacaaataaataaataaataaaattagctgggaatggtgatgcacacctggagtcctagctactcagaaggctgaggcaggacgatcacttgacctcagaagtctgaggttacagtgagctatgatcataccagtgcactccagtctgggtgacagaacaagaccctgtctccaaaaattaaataaataaaacaaaaaaaaaaaaaaa

SEQ ID NO: 408 - protein, 891 aa, Homo Sapiens
MSLRIDVDTNFPECVVDAGKVTLGTQQRQEMDPRLREKQNEIILRAVCALLNSGGGIIKAEIENKGYNYERHGVGLDVPPIFRSHLDKMQKENHFLIFVKSWNTEAGVPLATLCSNLYHRERTSTDVMDSQEALAFLKCRTQTPTNINVSNSLGPQAAQGSVQYEGNINVSAAALFDRKRLQYLEKLNLPESTHVEFVMFSTDVSHCVKDRLPKCVSAFANTEGGYVFFGVHDETCQVIGCEKEKIDLTSLRASIDGCIKKLPVHHFCTQRPEIKYVLNFLEVHDKGALRGYVCAIKVEKFCCAVFAKVPSSWQVKDNRVRQLPTREWTAWMMEADPDLSRCPEMVLQLSLSSATPRSKPVCIHKNSECLKEQQKRYFPVFSDRVVYTPESLYKELFSQHKGLRDLINTEMRPFSQGILIFSQSWAVDLGLQEKQGVICDALLISQNNTPILYTIFSKWDAGCKGYSMIVAYSLKQKLVNKGGYTGRLCITPLVCVLNSDRKAQSVYSSYLQIYPESYNFMTPQHMEALLQSLVIVLLGFKSFLSEELGSEVLNLLTNKQYELLSKNLRKTRELFVHGLPGSGKTILALRIMEKIRNVFHCEPANILYICENQPLKKLVSFSKKNICQPVTRKTFMKNNFEHIQHIIIDDAQNFRTEDGDWYGKAKFITQTARDGPGVLWIFLDYFQTYHLSCSGLPPPSDQYPREEINRVVRNAGPIANYLQQVMQEARQNPPPNLPPGSLVMLYEPKWAQGVPGNLEIIEDLNLEEILIYVANKCRFLLRNGYSPKDIAVLFTKASEVEKYKDRLLTAMRKRKLSQLHEESDLLLQIGDASDVLTDHIVLDSVCRFSGLERNIVFGINPGVAPPAGAYNLLLCLASRAKRHLYILKASV

SEQ ID NO: 409 - DNA, 2272 bp, Homo Sapiens
agtctccctccagcgggcggcgactccgggttccccctcgcgccctctcgcagaggctcgcccccttccccgcccaccgtccctgcgagcgcgggcggcggcggtgggcgtgtgcgcgcgtgaaggacgccgcctctctctcgctcctgcgttcgcaggcggcggctggcggccggcttctcgctcgggcagcggcggcggcggcggcggcggcttccggagtcccgctgcgaagatgctcaaagtcacggtgccctcctgctccgcctcgtcctgctcttcggtcaccgccagtgcggccccggggaccgcgagcctcgtcccggattactggatcgacggctccaacagggatgcgctgagcgatttcttcgaggtggagtcggagctgggacggggtgctacatccattgtgtacagatgcaaacagaaggggacccagaagccttatgctctcaaagtgttaaagaaaacagtggacaaaaaaatcgtaagaactgagataggagttcttcttcgcctctcacatccaaacattataaaacttaaagagatatttgaaacccctacagaaatcagtctggtcctagaactcgtcacaggaggagaactgtttgataggattgtggaaaagggatattacagtgagcgagatgctgcagatgccgttaaacaaatcctggaggcagttgcttatctacatgaaaatgggattgtccatcgtgatctcaaaccagagaatcttctttatgcaactccagccccagatgcaccactcaaaatcgctgattttggactctctaaaattgtggaacatcaagtgctcatgaagacagtatgtggaaccccagggtactgcgcacctgaaattcttagaggttgtgcctatggacctgaggtggacatgtggtctgtaggaataatcacctacatcttactttgtggatttgaaccattctatgatgaaagaggcgatcagttcatgttcaggagaattctgaattgtgaatattactttatctccccctggtgggatgaagtatctctaaatgccaaggacttggtcagaaaattaattgttttggatccaaagaaacggctgactacatttcaagctctccagcatccgtgggtcacaggtaaagcagccaattttgtacacatggataccgctcaaaagaagctccaagaattcaatgcccggcgtaagcttaaggcagcggtgaaggctgtggtggcctcttcccgcctgggaagtgccagcagcagccatggcagcatccaggagagccacaaggctagccgagacccttctccaatccaagatggcaacgaggacatgaaagctattccagaaggagagaaaattcaaggcgatggggcccaagccgcagttaagggggcacaggctgagctgatgaaggtgcaagccttagagaaagttaaaggtgcagatataaatgctgaagaggcccccaaaatggtgcccaaggcagtggaggatgggataaaggtggctgacctggaactagaggagggcctagcagaggagaagctgaagactgtggaggaggcagcagctcccagagaagggcaaggaagctctgctgtgggttttgaagttccacagcaagatgtgatcctgccagagtactaaacagcttccttcagatctggaagccaaacaccggcattttatgtactttgtccttcagcaagaaaggtgtggaagcatgatatgtactatagtgattctgtttttgaggtgcaaaaaacatacatatataccagttggtaattctaacttcaatgcatgtgactgctttatgaaaataatagtgtcttctatggcatgtaatggatacctaataccgatgagttaaatcttgcaagttaacacaacgtaacacttaaaagcatacattttcagcaaccagtggcacatatttgaagtgaatagtagcaaattgtttttgctttgaaaatctagccatcctacatcctttggatttcttcacaaggcagtaattcctttgaactactgcttagctaatactaggtagtgctaaaagacatgttcccataacttttacaacattttactttttatcattgatgtgttcaaactgtttacaaggagatgcttatagatgatagttgtacatatgtgcaaaaaaaaatccacttgcaatggtaagaaattgaagtatccttaaaggccatgaagccatatgtccctaaaaaaaaaaaaaaaaaaaaaaaaaaaaaaaaa

SEQ ID NO: 410 - protein, 473 aa, Homo Sapiens
MLKVTVPSCSASSCSSVTASAAPGTASLVPDYWIDGSNRDALSDFFEVESELGRGATSIVYRCKQKGTQKPYALKVLKKTVDKKIVRTEIGVLLRLSHPNIIKLKEIFETPTEISLVLELVTGGELFDRIVEKGYYSERDAADAVKQILEAVAYLHENGIVHRDLKPENLLYATPAPDAPLKIADFGLSKIVEHQVLMKTVCGTPGYCAPEILRGCAYGPEVDMWSVGIITYILLCGFEPFYDERGDQFMFRRILNCEYYFISPWWDEVSLNAKDLVRKLIVLDPKKRLTTFQALQHPWVTGKAANFVHMDTAQKKLQEFNARRKLKAAVKAVVASSRLGSASSSHGSIQESHKASRDPSPIQDGNEDMKAIPEGEKIQGDGAQAAVKGAQAELMKVQALEKVKGADINAEEAPKMVPKAVEDGIKVADLELEEGLAEEKLKTVEEAAAPREGQGSSAVGFEVPQQDVILPEY

SEQ ID NO: 411 - DNA, 1880 bp, Homo Sapiens
gggtcggggccacaaggccgcgctaggcggacccaggacacagcccgcgcgcagcccacccgcccgccgcctgccagagctgctcggcccgcagccagggggacagcggctggtcggaggctcgcagtgctgtcggcgagaagcagtcgggtttggagcgcttgggtcgcgttggtgcgcggtggaacgcgcccagggaccccagttcccgcgagcagctccgcgccgcgcctgagagactaagctgaaactgctgctcagctcccaagatggtgccacccaaattgcatgtgcttttctgcctctgcggctgcctggctgtggtttatccttttgactggcaatacataaatcctgttgcccatatgaaatcatcagcatgggtcaacaaaatacaagtactgatggctgctgcaagctttggccaaactaaaatcccccggggaaatgggccttattccgttggttgtacagacttaatgtttgatcacactaataagggcaccttcttgcgtttatattatccatcccaagataatgatcgccttgacaccctttggatcccaaataaagaatatttttggggtcttagcaaatttcttggaacacactggcttatgggcaacattttgaggttactctttggttcaatgacaactcctgcaaactggaattcccctctgaggcctggtgaaaaatatccacttgttgttttttctcatggtcttggggcattcaggacactttattctgctattggcattgacctggcatctcatgggtttatagttgctgctgtagaacacagagatagatctgcatctgcaacttactatttcaaggaccaatctgctgcagaaataggggacaagtcttggctctaccttagaaccctgaaacaagaggaggagacacatatacgaaatgagcaggtacggcaaagagcaaaagaatgttcccaagctctcagtctgattcttgacattgatcatggaaagccagtgaagaatgcattagatttaaagtttgatatggaacaactgaaggactctattgatagggaaaaaatagcagtaattggacattcttttggtggagcaacggttattcagactcttagtgaagatcagagattcagatgtggtattgccctggatgcatggatgtttccactgggtgatgaagtatattccagaattcctcagcccctcttttttatcaactctgaatatttccaatatcctgctaatatcataaaaatgaaaaaatgctactcacctgataaagaaagaaagatgattacaatcaggggttcagtccaccagaattttgctgacttcacttttgcaactggcaaaataattggacacatgctcaaattaaagggagacatagattcaaatgtagctattgatcttagcaacaaagcttcattagcattcttacaaaagcatttaggacttcataaagattttgatcagtgggactgcttgattgaaggagatgatgagaatcttattccagggaccaacattaacacaaccaatcaacacatcatgttacagaactcttcaggaatagagaaatacaattaggattaaaataggttttttaaaagtcttgtttcaaaactgtctaaaattatgtgtgtgtgtgtgtgtgtgtgtgtgtgtgtgagagagagagagagagagagagagagagagagagagaattttaatgtattttcccaaaggactcatattttaaaatgtaggctatactgtaatcgtgattgaagcttggactaagaattttttccctttagatgtaaagaaagaatacagtatacaatattcaaaaaaaaaaaaaaaaaaaaaaaaaaaaaaaaaaaaaaaaaa

SEQ ID NO: 412 - protein, 441 aa, Homo Sapiens
MVPPKLHVLFCLCGCLAVVYPFDWQYINPVAHMKSSAWVNKIQVLMAAASFGQTKIPRGNGPYSVGCTDLMFDHTNKGTFLRLYYPSQDNDRLDTLWIPNKEYFWGLSKFLGTHWLMGNILRLLFGSMTTPANWNSPLRPGEKYPLVVFSHGLGAFRTLYSAIGIDLASHGFIVAAVEHRDRSASATYYFKDQSAAEIGDKSWLYLRTLKQEEETHIRNEQVRQRAKECSQALSLILDIDHGKPVKNALDLKFDMEQLKDSIDREKIAVIGHSFGGATVIQTLSEDQRFRCGIALDAWMFPLGDEVYSRIPQPLFFINSEYFQYPANIIKMKKCYSPDKERKMITIRGSVHQNFADFTFATGKIIGHMLKLKGDIDSNVAIDLSNKASLAFLQKHLGLHKDFDQWDCLIEGDDENLIPGTNINTTNQHIMLQNSSGIEKYN

SEQ ID NO: 413 - DNA, 10276 bp, Homo Sapiens
ctcagttgctcccagcagtggccctgggaccagctctgctccttgcaccccgctccctgcctggacacaggctcactcgctgccttcttctgggggaaaccagcttcttgccagccacagctgctgcctccgccactggccaccgcccctgtcctgggagtcccttggcccagacacccacctgacttagtggctcctctgcaggaaaggtggctgccccctgcgttcctccatccaaccatgagctggtgcccatcaccactgagaatgcaccaaagaatgtagtggacaagggagaaggagcctcccggggtggaaacacacggaaaagcctcgaggacaacggctccaccagggtcaccccgagtgtccagccccacctccagcccatcagaaacatgagtgtgagccggaccatggaggacagctgtgagctggacctggtgtacgtcacagagaggatcatcgctgtctccttccccagcacagccaatgaggagaacttccggagcaacctccgtgaggtggcgcagatgctcaagtccaaacatggaggcaactacctgctgttcaacctctctgagcggagacctgacatcacgaagctccatgccaaggtactggaatttggctggcccgacctccacaccccagccctggagaagatctgcagcatctgtaaggccatggacacatggctcaatgcagaccctcacaatgtcgttgttctacacaacaagggaaaccgaggcaggataggagttgtcatcgcggcttacatgcactacagcaacatttctgccagtgcggaccaggctctggaccggtttgcaatgaagcggttctatgaggataagattgtgcccattggccagccatcccaaagaaggtacgtgcattacttcagtggcctgctctccggctccatcaaaatgaacaacaagcccttgtttctgcaccacgtgatcatgcacggcatccccaactttgagtctaaaggaggatgtcggccatttctccgcatctaccaggccatgcaacctgtgtacacatctggcatctacaacatcccaggagacagccagactagcgtctgcatcaccatcgagccaggactgctcttgaagggagacatcttgctgaagtgctaccacaagaagttccgaagcccagcccgagacgtcatcttccgtgtgcagttccacacctgtgccatccatgacctgggggttgtctttgggaaggaggaccttgatgatgctttcaaagatgatcgatttccagagtatggcaaagtggagtttgtattttcttatgggccagagaaaattcaaggcatggagcacctggagaacgggccgagcgtgtctgtggactataacacctccgaccccctcatccgctgggactcctacgacaacttcagtgggcatcgagatgacggcatggaggaggtggtgggacacacgcaggggccactagatgggagcctgtatgctaaggtgaagaagaaagactccctgcacggcagcaccggggctgttaatgccacacgtcctacactgtcggccacccccaaccacgtggaacacacgctttctgtgagcagcgactcgggcaactccacagcctccaccaagaccgacaagaccgacgagcctgtccccggggcctccagtgccactgctgccttgagtccccaggagaagcgggagctggaccgcctgctgagtggctttggcttagagcgagagaagcaaggcgccatgtaccacacccagcacctcaggtcccgcccagcagggggctcggctgtgccctcctctggacgccacgttgtcccagcccaggttcatgtcaatggtggggcgttagcatctgagcgggagacagacatcctggacgatgaattgccaaaccaggatggtcacagtgcgggcagcatgggcacactctcttctctggacggggtcaccaacaccagtgaggggggctacccagaggccctgtccccactgaccaacggtctggacaagtcctaccccatggagcctatggtcaatggaggaggctacccctacgagtctgccagccgggcggggcctgcccatgctggccacacggcccccatgcggccctcctactctgcacaggagggtttagctggctaccagagggaggggccccacccagcctggccacagccagtgaccacctcccactatgcccatgaccccagcggtatgttccgctctcaatccttttcggaagctgaaccccagctgcccccagctccggtccgagggggaagcagccgggaggctgtgcaaaggggactgaattcgtggcagcagcagcagcagcagcagcagcagcctcgcccacctccacgccagcaggaaagagcccacttggagagtcttgtagccagcaggcccagccctcagccattggcagagacccccatccccagtctccctgagttcccgcgagcagcctcccagcaggagattgaacagtccatcgaaacactcaatatgctgatgctggacctggagccagcctccgctgctgccccactacacaagtcccagagtgtccccggggcctggccaggggcttctccactctcctcccagcccctctctggatcctcccgtcagtcccatccactgacccagtccagatctggctatatccccagtgggcattcgttgggaacccctgagccagccccacgggcctctctggagtctgtccctcctggcaggtcttactcaccttatgactatcagccatgtttggctgggcctaaccaggatttccattcaaagagcccagcctcttcctccttgcctgccttccttccgaccacccacagccctccagggcctcagcaacccccagcctctctccctggcctcactgctcagcctctgctctcaccaaaggaagcgacttcagacccctcccggactccagaggaggagccattgaatttagaagggctggtggcccacagggtagcaggggtacaggctcgggagaagcagcctgcagagcccccagcccctctgcggaggcgggcggccagtgatggacagtatgagaaccagtctccagaagccacatcccctcgtagccctggggttcgctcccctgtccagtgtgtctccccggagctggctcttaccatcgctctcaatcctggagggcggcccaaagagccccatttgcacagctacaaggaggccttcgaggagatggagggaacctccccgagcagcccaccacccagtggggtgcggtcccccccgggtctggccaagacacccctgtctgctctgggcctgaaacctcacaacccagcggacatcctgttgcaccccacaggagttaccagaagacggatccagccagaggaagatgaggggaaggtggtggtcaggctgtcagaagagccccggagctatgtggagtctgtggcacggacagcggtggctggaccccgagctcaggactctgagcccaagagctttagtgctccagccacccaggcctatggccatgagatacccctgaggaacgggaccctgggtggctcctttgtctcccccagccccctctccaccagcagccccatcctcagtgctgacagcacttcagtggggagtttcccgtcgggagagagcagtgaccagggtccccggacgcccacccagcctctgttggagtctggcttccgctcaggcagcctgggacagcccagcccgtctgcccagagaaactaccagagctcttctcctctcccgactgtgggcagtagctacagcagccccgactactcacttcagcatttcagctcctctccggaaagccaggctcgagctcagttcagtgtggctggcgtccacacggtgcctgggagccctcaggcgcgccacagaacagtgggcaccaacactccccctagtcctggcttcggctggcgggccatcaatcccagcatggctgcccccagcagtcccagtttgagccatcaccagatgatgggtccaccaggcactggcttccatggtagcactgtctccagcccccagagcagtgcagcgaccaccccggggagccccagcctgtgtcggcacccagcaggggtctaccaggtttctggcctccacaacaaagtggccaccaccccggggagtcccagcctgggccggcaccctggggctcaccaaggcaacctggcctccggtcttcatagcaatgcaatagccagccctggaagccccagcctgggccgtcacctcggagggtctggatctgtggttcccggcagcccctgcttggaccggcatgtggcctatggtggctattctaccccggaggatcggagacccacactgtcccggcagagcagtgcctctggctaccaggctccttccacgccctccttccctgtctcccctgcctactaccctggcctgagcagccctgccacctccccgtcaccagactccgcagccttccggcaagggagcccaacaccagccttgccagagaagcgaaggatgtcagtgggagaccgggcaggcagcctccccaactatgccaccatcaatgggaaggtgtcttcgcctgtcgccagcggcatgtccagtcccagtgggggcagcaccgtctccttctcccacactctgcccgacttctccaagtactccatgccagacaacagcccggagacgcgggctaaagtgaagtttgtccaggacacttctaagtattggtacaagcctgagatctccagggagcaggccatcgcgctcctcaaggaccaggagccgggggccttcatcatccgcgacagtcactccttccgaggcgcgtacgggctggccatgaaggtgtcttcgccacctccaaccatcatgcagcagaataaaaaaggagacatgacccatgagctggtcaggcattttctgatagagactggccccagaggagtcaagctcaagggctgccccaatgagccaaacttcggatcgctgtctgccctggtctaccagcactccatcatcccattggccctgccttgcaagctggtcattccaaaccgagaccccacagatgaatcgaaagatagctccggccctgccaactcaactgcagacctgctgaaacaaggggcagcctgcaatgtgctcttcgtcaactctgtggacatggagtcactcactgggccacaggccatctctaaagccacatctgagacgttggctgcagaccccacgccagctgccaccatcgttcacttcaaagtctctgcccagggaatcactctgactgacaaccagagaaagctctttttcagacgccactaccctctcaacactgtcaccttctgtgacctggatccacaggaaagaaagtggatgaaaacagagggtggtgcccctgctaagctcttcggcttcgtggcccggaagcagggcagcaccacggacaacgcctgccacctctttgctgagcttgaccccaaccagccggcctctgccatcgtcaacttcgtctccaaggtcatgctgaatgccggccaaaagagatgaaccctgccccttgcccagggccagtgccatggggaaggggcttgtggggaggggacccatgaatcctgaccactcttgaacccagaaggaggactttgggccaatttcggaggagagaagaaagtgcaacgtggggagagggaagtgaattgcagaggggagggggaaaagagagagagagagagagagagagagagagagaaagatggaggagaagaacttggattcccctgggtagatggaaactgcaaaaacccaaagcctccaaaactaaccaggtccacctaacaccccctccctcccctaagaagatggatgtcctcaaaagagaaggaacaaacctccttgggaatccacattttttgggggaatggaaaagctctgtctccctaactcaactgctttgcaaggggaaatcaagctgggagaatctttttctggccacctgtggggtaggttgtcaaaccaaacagagccaccgtgggacatcaagtggaagaacttgtttgcttgaaagtatctcagacccaaggcacctcaggtctctttgctgtgcctccactatattgtcgtgtgggtgtgtgtctgcacccacatcctcacacattgatctagatctgcctttatccactcgaattataaacagctcggcttgtccttgtcccatgtgtttgtagacacacatgcatactgtccaaagattagggttggtggtggcagtgcagcaggggagggacaaacaaccaagctatgggtgacagaggctctctcctggtgcctgcacctgcactctagtgaccctgggtgccgccagacccttctcttctacaaagaccccagcaggagtgggagggtctgcaatggcatcgccctgtcctgccttggccagaagcctggagctttggtttgaggaggtagagatatgtgtatccataggaagagatctgtcagaacaggcagctgttgagctcggggtgtcttccccaaggcatgtggctcagcagcaagaaaggcaagttgctcctgctggggccctggactctgccttagctcccacctctcagccttgttattgggtttcatgcccctggaccagccttatctcagacctgcttacctgcatgatgcctttttgggggctggggattgagtcttgctgctctgcccagccctgttctattctgcagggtccctgtgttggaattctccctggggaacctactttctgctcagtgaggctccggccagaaacctggagtccttatcctcccctctgtaagtgttttagggtctggcttttgcaggcaccctctgacctcagcagagctcctgggcctgctgcctgcacaccacatcgcctacctacaatgccaaagcctcactgtcaccctttctgccttggtttccctagctgagccacgctgcccatgcagcagagggcagaaggcttgcacttgggccaaagggcctaaggtccactggacagttgggaaaacacctgaccaccatttaaggactctaagccagaatggaaaattcaccaggactccattcttaagcctatgcgagtcccctagagagaggcattgtactgatatataaatattatataatatatacatgagacatactgacagaatctgtaagctaataaaatgtaagaaaaggttaaaaaaagaataggtaaattgacaagaagtatttattgtttttccatattgctttattgccttccttggggataaaccaattcctatccttttttatatgtgtaagtaaagcctgaagtgtagggggcctttgttcttgaagcagccagggtctccttgccctggccttggccttccctagactgtgtggggctcagcattgggaggggttgcacatgtcccagcctttggcccccttacttttcagcaagccaggggcccagcagtcagctcccaggatgtgtggggagctgtccctgactctgcaggcctgagcgagtgtgtgagcatgcggggacatgggtgtgtatggcacacataggtgcgtgtgtgtcttttgtattttttctcctccaaggagctgtgtcagtgtggacgttctgtttcagggagttggaaaggagggtgtctgcagaaggtggagagcaggggcagaggccccactggccaccccctgcttcccagagtgaaaccttgtgcctggtgaccaaagtccctccaaagtgctcttccttctgggttattcaagccaaatatctgggtttccccctctcctcattccctagcaaaccccaattatcttccaagataggagatatttcccatccccttcctttgtaaatatctcatctcccactggagagcccaggagcctattcctggcatggatgttctgtccacacttgaggctgggcggtgtatcagacccttcaagcagcctggctggggcccaggactgagtctggggtcagctttcacggtcgcttttcccttcctcaccacccaccacagcccaccttgcatgcatggccagcccctccactccagcctgagccatgtgtgcccctgcgggaggacccattcatgccagaaagctggtaactccctcccagcatccctgcggaaggagtcagtttctgagagtgtgacttttcaaggcgaatgatggggaagggttccccagtccccacagtggccccacctctgggccctgcaccagagcccttctgtgtcacggcgggctgtgcacccatgcacacacctacgcacacacaacactccgcactgcagtatattcttgccaaagatttcctttaaaagcaagcacttttactaattattattttgtaaatgtttatcttcttctgtcttctccctccctgaatctattttactgttgtttattgttgaatctgtgtgtcagccaggagagcgctgtctggccttgaacatgggctgggatgggaaagggtctgggagaagatgggcaacaaagagccagggagtcatggacatcgcagcgacgcagaccccagcaggttcagtcccgtgctgccaccagctgtccagctgggtgtctggagggaagagggcagaggagggtcatgtcccttcagctgggggaggggcccagtgagctccacgtggctttttcccaaagggagcaagagggaaggattgggcgagaaaacaatggagaggggacctgcgaaggaaaacagggaggaagtgagcggtttgatcagcctgctatcacggtgttctggctctcttatttagccaggcgcttaagggacagatacatcacatcctaagtttgggaaaggcctttgacccatgtcatctgagcgtctcctccagtagctctgaaagctgtggacaccaatggccaggattccttctcccctggtttttgaggatccctgggtcttctgagactggccaggagagggatggtggggccagtggttgtgtgaaagcaggaggggcagccctcctggacaagtgtgatccccctataaacggctctcaggaggttagtgagtaggagattctgccttgttctgatgagcctgtgcaggggctccaggggagcatgctgtccagggggcacagaagggtggtgagtgtgatcaaatctagtctcactcccactttttagtctcactcctacttttgtccaccacccctgcctcctggatcttctcccactttttttttcagctttaggacctggggagatcctgtgagtcaaggcagacacccaatcctgcccccacactcggggtcctccaagaggttggggggcagagtcccagagcagccctttaccccaggtccaggccctggaatcctgagactcgcgtttccttggccagtggtaacacaggacgtgtgtgcgcatgtgcaagtgtggatgtatgtgtgtgcgtgtgttttgctcatttctttagggaacttgggagtcggggttggaggtgctgggcaatggaacttcaaattcaatgtcgcccagcagtgaggggagtcgggaggtgaggcctgtaggccaaccaattggtggagtctcagcgatagcccaggtgagaagtggttcacccagaggggcagggtgggggcctcgggcagatctgtccctcttggcacctctgtcctcaaatgtccaaaatgttggaggacctctgttcatatcccacgcctgggctcttgccagcagtggagttactgtagagggatgtcccaagcttgttttccaatcagtgttaagctgtttgaaactctcctgtgtctgtgttttgtttgtgcgtgtgtgtgagagcacatcagtgtgtgcaggctgtgtttccccatttctctcctcccttcagacccatcattgagaacaaatgtaagaaatcccttcccaccaccctccctgcctcccaggccctctgcgggggaaacaagatcacccagcatccttccccaccccagctgtgtatttatatagatggaaatatactttatattttgtatcatcgtgcctatagccgctgccaccgtgtataaatcctggtgtatgctccttatcctggacatgaatgtattgtacactgacgcgtccccactcctgtacagctgctttgtttctttgcaatgcattgtatggctttataaatgataaagttaaagaaaactctg

SEQ ID NO: 414 - protein, 1735 aa, Homo Sapiens
MSVSRTMEDSCELDLVYVTERIIAVSFPSTANEENFRSNLREVAQMLKSKHGGNYLLFNLSERRPDITKLHAKVLEFGWPDLHTPALEKICSICKAMDTWLNADPHNVVVLHNKGNRGRIGVVIAAYMHYSNISASADQALDRFAMKRFYEDKIVPIGQPSQRRYVHYFSGLLSGSIKMNNKPLFLHHVIMHGIPNFESKGGCRPFLRIYQAMQPVYTSGIYNIPGDSQTSVCITIEPGLLLKGDILLKCYHKKFRSPARDVIFRVQFHTCAIHDLGVVFGKEDLDDAFKDDRFPEYGKVEFVFSYGPEKIQGMEHLENGPSVSVDYNTSDPLIRWDSYDNFSGHRDDGMEEVVGHTQGPLDGSLYAKVKKKDSLHGSTGAVNATRPTLSATPNHVEHTLSVSSDSGNSTASTKTDKTDEPVPGASSATAALSPQEKRELDRLLSGFGLEREKQGAMYHTQHLRSRPAGGSAVPSSGRHVVPAQVHVNGGALASERETDILDDELPNQDGHSAGSMGTLSSLDGVTNTSEGGYPEALSPLTNGLDKSYPMEPMVNGGGYPYESASRAGPAHAGHTAPMRPSYSAQEGLAGYQREGPHPAWPQPVTTSHYAHDPSGMFRSQSFSEAEPQLPPAPVRGGSSREAVQRGLNSWQQQQQQQQQPRPPPRQQERAHLESLVASRPSPQPLAETPIPSLPEFPRAASQQEIEQSIETLNMLMLDLEPASAAAPLHKSQSVPGAWPGASPLSSQPLSGSSRQSHPLTQSRSGYIPSGHSLGTPEPAPRASLESVPPGRSYSPYDYQPCLAGPNQDFHSKSPASSSLPAFLPTTHSPPGPQQPPASLPGLTAQPLLSPKEATSDPSRTPEEEPLNLEGLVAHRVAGVQAREKQPAEPPAPLRRRAASDGQYENQSPEATSPRSPGVRSPVQCVSPELALTIALNPGGRPKEPHLHSYKEAFEEMEGTSPSSPPPSGVRSPPGLAKTPLSALGLKPHNPADILLHPTGVTRRRIQPEEDEGKVVVRLSEEPRSYVESVARTAVAGPRAQDSEPKSFSAPATQAYGHEIPLRNGTLGGSFVSPSPLSTSSPILSADSTSVGSFPSGESSDQGPRTPTQPLLESGFRSGSLGQPSPSAQRNYQSSSPLPTVGSSYSSPDYSLQHFSSSPESQARAQFSVAGVHTVPGSPQARHRTVGTNTPPSPGFGWRAINPSMAAPSSPSLSHHQMMGPPGTGFHGSTVSSPQSSAATTPGSPSLCRHPAGVYQVSGLHNKVATTPGSPSLGRHPGAHQGNLASGLHSNAIASPGSPSLGRHLGGSGSVVPGSPCLDRHVAYGGYSTPEDRRPTLSRQSSASGYQAPSTPSFPVSPAYYPGLSSPATSPSPDSAAFRQGSPTPALPEKRRMSVGDRAGSLPNYATINGKVSSPVASGMSSPSGGSTVSFSHTLPDFSKYSMPDNSPETRAKVKFVQDTSKYWYKPEISREQAIALLKDQEPGAFIIRDSHSFRGAYGLAMKVSSPPPTIMQQNKKGDMTHELVRHFLIETGPRGVKLKGCPNEPNFGSLSALVYQHSIIPLALPCKLVIPNRDPTDESKDSSGPANSTADLLKQGAACNVLFVNSVDMESLTGPQAISKATSETLAADPTPAATIVHFKVSAQGITLTDNQRKLFFRRHYPLNTVTFCDLDPQERKWMKTEGGAPAKLFGFVARKQGSTTDNACHLFAELDPNQPASAIVNFVSKVMLNAGQKR

SEQ ID NO: 415 - DNA, 774 bp, Homo Sapiens
agggcaagttaagggaatagtggaatgaaggttcatttttcattctcacaaactaatgaaaccctgcttatcttaaaccaacctgctcactggagcagggaggacaggaccagcataaaaggcagggcagagtcgactgttgcttacactttcttctgacataacagtgttcactagcaacctcaaacagacaccatggtgcatctgactcctgaggagaagactgctgtcaatgccctgtggggcaaagtgaacgtggatgcagttggtggtgaggccctgggcagattactggtggtctacccttggacccagaggttctttgagtcctttggggatctgtcctctcctgatgctgttatgggcaaccctaaggtgaaggctcatggcaagaaggtgctaggtgcctttagtgatggcctggctcacctggacaacctcaagggcactttttctcagctgagtgagctgcactgtgacaagctgcacgtggatcctgagaacttcaggctcttgggcaatgtgctggtgtgtgtgctggcccgcaactttggcaaggaattcaccccacaaatgcaggctgcctatcagaaggtggtggctggtgtggctaatgccctggctcacaagtaccattgagatcctggactgtttcctgataaccataagaagaccctatttccctagattctattttctgaacttgggaacacaatgcctacttcaagggtatggcttctgcctaataaagaatgttcagctcaacttcctgat

SEQ ID NO: 416 - protein, 147 aa, Homo Sapiens
MVHLTPEEKTAVNALWGKVNVDAVGGEALGRLLVVYPWTQRFFESFGDLSSPDAVMGNPKVKAHGKKVLGAFSDGLAHLDNLKGTFSQLSELHCDKLHVDPENFRLLGNVLVCVLARNFGKEFTPQMQAAYQKVVAGVANALAHKYH

SEQ ID NO: 417 - DNA, 1730 bp, Homo Sapiens
ggcggtgccggccgaacccagacccgaggttttagaagcagagtcaggcgaagctgggccagaaccgcgacctccgcaaccttgagcggcatccgtggagtgcgcctgcgcagctacgaccgcagcaggaaagcgccgccggccaggcccagctgtggccggacagggactggaagagaggacgcggtcgagtaggtgtgcaccagccctggcaacgagagcgtctaccccgaactctgctggccttgaggtggggaagccggggagggcagttgaggaccccgcggaggcgcgtgactggttgagcgggcaggccagcctccgagccgggtggacacaggttttaaaacatgaatcctacactcatccttgctgccttttgcctgggaattgcctcagctactctaacatttgatcacagtttagaggcacagtggaccaagtggaaggcgatgcacaacagattatacggcatgaatgaagaaggatggaggagagcagtgtgggagaagaacatgaagatgattgaactgcacaatcaggaatacagggaagggaaacacagcttcacaatggccatgaacgcctttggagacatgaccagtgaagaattcaggcaggtgatgaatggctttcaaaaccgtaagcccaggaaggggaaagtgttccaggaacctctgttttatgaggcccccagatctgtggattggagagagaaaggctacgtgactcctgtgaagaatcagggtcagtgtggttcttgttgggcttttagtgctactggtgctcttgaaggacagatgttccggaaaactgggaggcttatctcactgagtgagcagaatctggtagactgctctgggcctcaaggcaatgaaggctgcaatggtggcctaatggattatgctttccagtatgttcaggataatggaggcctggactctgaggaatcctatccatatgaggcaacagaagaatcctgtaagtacaatcccaagtattctgttgctaatgacaccggctttgtggacatccctaagcaggagaaggccctgatgaaggcagttgcaactgtggggcccatttctgttgctattgatgcaggtcatgagtccttcctgttctataaagaaggcatttattttgagccagactgtagcagtgaagacatggatcatggtgtgctggtggttggctacggatttgaaagcacagaatcagataacaataaatattggctggtgaagaacagctggggtgaagaatggggcatgggtggctacgtaaagatggccaaagaccggagaaaccattgtggaattgcctcagcagccagctaccccactgtgtgagctggtggacggtgatgaggaaggacttgactggggatggcgcatgcatgggaggaattcatcttcagtctaccagcccccgctgtgtcggatacacactcgaatcattgaagatccgagtgtgatttgaattctgtgatattttcacactggtaaatgttacctctattttaattactgctataaataggtttatattattgattcacttactgactttgcattttcgtttttaaaaggatgtataaatttttacctgtttaaataaaatttaatttcaaatgtagtggtggggcttctttctatttttgatgcactgaatttttgtgtaataaagaacataattgggctctaagccataaaaaaaaaaaaaaaaaa

SEQ ID NO: 418 - protein, 333 aa, Homo Sapiens [sequence omitted]

SEQ ID NO: 419 - DNA, 2442 bp, Homo Sapiens
aggaggaaggggagggaaaaggggaggaggaggaggatgtgagactgggttagagaaatgaaagaaagcaaggctttctgttgacattcagtgcagtctacctgcagcacagcacactccctttgggcaaggacctgagacccttgtgctaagtcaagaggctcaatgggctgcagaagaactagagaaggaccaagcaaagccatgatatttccatggaaatgtcagagcacccagagggacttatggaacatcttcaagttgtgggggtggacaatgctctgttgtgatttcctggcacatcatggaaccgactgctggacttaccattattctgaaaaacccatgaactggcaaagggctagaagattctgccgagacaattacacagatttagttgccatacaaaacaaggcggaaattgagtatctggagaagactctgcctttcagtcgttcttactactggataggaatccggaagataggaggaatatggacgtgggtgggaaccaacaaatctcttactgaagaagcagagaactggggagatggtgagcccaacaacaagaagaacaaggaggactgcgtggagatctatatcaagagaaacaaagatgcaggcaaatggaacgatgacgcctgccacaaactaaaggcagccctctgttacacagcttcttgccagccctggtcatgcagtggccatggagaatgtgtagaaatcatcaataattacacctgcaactgtgatgtggggtactatgggccccagtgtcagtttgtgattcagtgtgagcctttggaggccccagagctgggtaccatggactgtactcaccctttgggaaacttcagcttcagctcacagtgtgccttcagctgctctgaaggaacaaacttaactgggattgaagaaaccacctgtggaccatttggaaactggtcatctccagaaccaacctgtcaagtgattcagtgtgagcctctatcagcaccagatttggggatcatgaactgtagccatcccctggccagcttcagctttacctctgcatgtaccttcatctgctcagaaggaactgagttaattgggaagaagaaaaccatttgtgaatcatctggaatctggtcaaatcctagtccaatatgtcaaaaattggacaaaagtttctcaatgattaaggagggtgattataaccccctcttcattccagtggcagtcatggttactgcattctctgggttggcatttatcatttggctggcaaggagattaaaaaaaggcaagaaatccaagagaagtatgaatgacccatattaaatcgcccttggtgaaagaaaattcttggaatactaaaaatcatgagatcctttaaatccttccatgaaacgttttgtgtggtggcacctcctacgtcaaacatgaagtgtgtttccttcagtgcatctgggaagatttctacctgaccaacagttccttcagcttccatttcgcccctcatttatccctcaacccccagcccacaggtgtttatacagctcagctttttgtcttttctgaggagaaacaaataagaccataaagggaaaggattcatgtggaatataaagatggctgactttgctctttcttgactcttgttttcagtttcaattcagtgctgtacttgatgacagacacttctaaatgaagtgcaaatttgatacatatgtgaatatggactcagttttcttgcagatcaaatttcacgtcgtcttctgtatactgtggaggtacactcttatagaaagttcaaaaagtctacgctctcctttctttctaactccagtgaagtaatggggtcctgctcaagttgaaagagtcctatttgcactgtagcctcgccgtctgtgaattggaccatcctatttaactggcttcagcctccccaccttcttcagccacctctctttttcagttggctgacttccacacctagcatctcatgagtgccaagcaaaaggagagaagagagaaatagcctgcgctgttttttagtttgggggttttgctgtttccttttatgagacccattcctatttcttatagtcaatgtttcttttatcacgatattattagtaagaaaacatcactgaaatgctagctgcaagtgacatctctttgatgtcatatggaagagttaaaacaggtggagaaattccttgattcacaatgaaatgctctcctttcccctgcccccagaccttttatccacttacctagattctacatattctttaaatttcatctcaggcctccctcaaccccaccacttcttttataactagtcctttactaatccaacccatgatgagctcctcttcctggcttcttactgaaaggttaccctgtaacatgcaattttgcatttgaataaagcctgctttttaagtgttaact

SEQ ID NO: 420 - protein, 385 aa, Homo Sapiens
MGCRRTREGPSKAMIFPWKCQSTQRDLWNIFKLWGWTMLCCDFLAHHGTDCWTYHYSEKPMNWQRARRFCRDNYTDLVAIQNKAEIEYLEKTLPFSRSYYWIGIRKIGGIWTWVGTNKSLTEEAENWGDGEPNNKKNKEDCVEIYIKRNKDAGKWNDDACHKLKAALCYTASCQPWSCSGHGECVEIINNYTCNCDVGYYGPQCQFVIQCEPLEAPELGTMDCTHPLGNFSFSSQCAFSCSEGTNLTGIEETTCGPFGNWSSPEPTCQVIQCEPLSAPDLGIMNCSHPLASFSFTSACTFICSEGTELIGKKKTICESSGIWSNPSPICQKLDKSFSMIKEGDYNPLFIPVAVMVTAFSGLAFIIWLARRLKKGKKSKRSMNDPY

SEQ ID NO: 421 - DNA, 1953 bp, Homo Sapiens
acagaacccagaaaaacaactcattcgctttcatttcctcactgactataaaagaatagagaaggaagggcttcagtgaccggctgcctggctgacttacagcagtcagactctgacaggatcatggctatgatggaggtccaggggggacccagcctgggacagacctgcgtgctgatcgtgatcttcacagtgctcctgcagtctctctgtgtggctgtaacttacgtgtactttaccaacgagctgaagcagatgcaggacaagtactccaaaagtggcattgcttgtttcttaaaagaagatgacagttattgggaccccaatgacgaagagagtatgaacagcccctgctggcaagtcaagtggcaactccgtcagctcgttagaaagatgattttgagaacctctgaggaaaccatttctacagttcaagaaaagcaacaaaatatttctcccctagtgagagaaagaggtcctcagagagtagcagctcacataactgggaccagaggaagaagcaacacattgtcttctccaaactccaagaatgaaaaggctctgggccgcaaaataaactcctgggaatcatcaaggagtgggcattcattcctgagcaacttgcacttgaggaatggtgaactggtcatccatgaaaaagggttttactacatctattcccaaacatactttcgatttcaggaggaaataaaagaaaacacaaagaacgacaaacaaatggtccaatatatttacaaatacacaagttatcctgaccctatattgttgatgaaaagtgctagaaatagttgttggtctaaagatgcagaatatggactctattccatctatcaagggggaatatttgagcttaaggaaaatgacagaatttttgtttctgtaacaaatgagcacttgatagacatggaccatgaagccagtttttttggggcctttttagttggctaactgacctggaaagaaaaagcaataacctcaaagtgactattcagttttcaggatgatacactatgaagatgtttcaaaaaatctgaccaaaacaaacaaacagaaaacagaaaacaaaaaaacctctatgcaatctgagtagagcagccacaaccaaaaaattctacaacacacactgttctgaaagtgactcacttatcccaagagaatgaaattgctgaaagatctttcaggactctacctcatatcagtttgctagcagaaatctagaagactgtcagcttccaaacattaatgcaatggttaacatcttctgtctttataatctactccttgtaaagactgtagaagaaagagcaacaatccatctctcaagtagtgtatcacagtagtagcctccaggtttccttaagggacaacatccttaagtcaaaagagagaagaggcaccactaaaagatcgcagtttgcctggtgcagtggctcacacctgtaatcccaacattttgggaacccaaggtgggtagatcacgagatcaagagatcaagaccatagtgaccaacatagtgaaaccccatctctactgaaagtacaaaaattagctgggtgtgttggcacatgcctgtagtcccagctacttgagaggctgaggcaagagaattgtttgaacccgggaggcagaggttgcagtgtggtgagatcatgccactacactccagcctggcgacagagcgagacttggtttcaaaaaaaaaaaaaaaaaaaacttcagtaagtacgtgttatttttttcaataaaattctattacagtatgtcatgtttgctgtagtgctcatatttattgttgtttttgttttagtactcacttgtttcataatatcaagattactaaaaatgggggaaaagacttctaatctttttttcataatatctttgacacatattacagaagaaataaatttcttacttttaatttaatatga

SEQ ID NO: 422 - protein, 281 aa, Homo Sapiens [sequence omitted]

SEQ ID NO: 423 - DNA, 2702 bp, Homo Sapiens
atttaaatgttagatcacgaggaagaaggaaaacgatttcaagagctgcacttaagcatctagaattttctgcgtcacacctcttgagagaagagactggctccaggtctgactcagtccactacaagctagacggtcttcttaaagcaccaacattacttgagtctttggataaaattgagaaaagagtctacaagtattgtggactctacaggaggcaggaggctgacaactggcagtaaagacaaagatgtcaggcctgcggcccggcactcaagtggaccctgagattgagctttttgtaaaggctggaagtgatggagagagtattggaaactgtcccttttgccaacgccttttcatgatcctctggcttaaaggagttaaatttaatgtgacaactgttgacatgaccagaaagcctgaagaactaaaggacttagccccaggtaccaatcctccgttcctggtgtataacaaggagttgaaaacagacttcattaaaattgaggagtttttagaacaaaccctggctcctccaaggtaccctcacctgagtcccaagtacaaggagtcttttgatgtgggctgtaacctctttgccaagttttctgcatacattaagaatacacaaaaggaggcaaataagaattttgaaaaatctctgctcaaagaattcaagcgtctggatgactacttaaacaccccacttctggatgaaattgatccagacagtgctgaggaacccccagtttccagaagactattcttggatggggaccagctaacactggctgattgtagcttgttacccaagctgaacattattaaagttgctgccaagaaatatcgtgactttgacattccagcagaattctcaggagtctggcgttatctccacaatgcctatgcccgtgaagaatttacccacacgtgtcctgaagacaaagaaattgaaaatacttacgcaaatgtggctaaacagaagagttaggagagctcttacaggagaaaaggctatatttgtgatcagattttacttattgacatattagaaaggtttttgcaaataagaatatgaaaaatactgtttcttctatccaactctcttatgaaaaggaactctgtattttctattagccataaataatctgtccactgtattttacaggtcttcatacttttacttaattttctttatctgtatggcaaaccactgcaatcctgaatgacatggaaagcatcacaatcttttgccctttgcttgaattcctggaatgcatacatataagctaaacagatgtctgcagttataaatgtcataagtagaggtacaatctcaccctgctccttagaaacatttccatataaatcgctaaaataatttcacatttttgttagtttaatatatacatgagtttatttctgatataaataataaatacagagagtgagcatatcagagaggcaaattcttaaagaatgatttttaaaatcagctctaggaagagctcaagatcaattggtcatagaacagcatttgacgcctagaactatgaccacctcatggtcagagatgagaatgtagcctttgtgaccagattatattatttttaaatgaagaagcactcattaaataaaacataattttaaaaaacaatataagaaacaaagtcaactgaatcttttattcatagaaatgaaaaggaaaataaaaactgtggctgaccaaaaggtcttcttgttgtccataaaaggataaggtaaacagtccttagataattacaaaactttctacaaaagttaaaatgttacattactatacgtattcagattcacttgttaaagtactcttaaatcattcaaatctggaaacaaaagctgaacttaactcttgctccctcaaaagagaaacacaagcataagtgcagcttcaaaaaaggaaaatattttaggctttggtggaagggtggagtttagataaaatttaaatgaagtagcgttttaataggttcaaagaaaagtaaggcaatgagcaaactcaaagtactgtccttgaaaaccatagagtcaagataaatgtatagtgtatggttaggtggcagagaaatgcaatcatgttgataatctttgagatacatcctgtcatcagtatatttcagaatacatgcaatgcactagcaagttacaattgatagaatacatttgaaatgttaaatgaaataagccaggcacagaaagacaaacaccacatgatctcactcatatgtggaattttaaaaagttgatctcactcatatgtggaattttaaaaagttgatctcacacaagtagagggtagaatcgtggttaccaggggctagggagagaaagaaggcagaggcactgaaagatgttggtcaatgggtataaagttacacctaggaagaataaattttggtattcaccacagtagggtgactatagcaaataataatgtagcatgtatttcaagatagctagaaaagcaggtttttaaatgtcaccacaaagaaataacaaatgtttatagtggtggatatggtaattacgcctatttgatcattatactgtgtgtacatgcattgaaacaccacattgtatcccatatatatgtacaattatgtgcccattatacatttaaaaaataaattttaaaaaccttcaaaaaaaaaaaaaaaaaa

SEQ ID NO: 424 - protein, 247 aa, Homo Sapiens
MSGLRPGTQVDPEIELFVKAGSDGESIGNCPFCQRLFMILWLKGVKFNVTTVDMTRKPEELKDLAPGTNPPFLVYNKELKTDFIKIEEFLEQTLAPPRYPHLSPKYKESFDVGCNLFAKFSAYIKNTQKEANKNFEKSLLKEFKRLDDYLNTPLLDEIDPDSAEEPPVSRRLFLDGDQLTLADCSLLPKLNIIKVAAKKYRDFDIPAEFSGVWRYLHNAYAREEFTHTCPEDKEIENTYANVAKQKS

SEQ ID NO: 425 - DNA, 5113 bp, Homo Sapiens
agaaacgcttttctgcggtccagtctagggggtctcagattggcggggatgggcagcagcggcaggtggccttggcttttgctgcagccgtcaacgacctatcatcggggtcctgcgtaaggtccggctggctgggacttggctgtgggtgggatggactggctgccggaccgagtgccctgcagttggtaggagtatgaggcagagtgatgcacacccgggcgcccagcatcgttctaattgccggagacattgcctcagactgtgcgctgctagaggctgcgttcctgagcaggaagcccgtttcctgggattggaactacccttcttggccagcgggaagtccccaaggacggagtcgaaaggtcaaatcttatctgtcagtgctgtgtgacagcatcgcaacgggatctgcagaacctgaactcgatccgtaatgcctcctgcctgcctctttcaagatggaggtgaaacctgtgggagaacctactcaagaggtgtctaaattcaaactttccaccaaggtagaaagcacgggacactggctggtggaagatcatgttcgaatatgggaagttttaaagacagaggagagctcgattcaggactggggtgaagaggtagaggaaggagctgtttaccatgtcaccctcaaaagagtccagattcaacaggctgccaataaaggagcaagatggctaggggttgaaggggaccagctgcctccaggacacacagtcagtcaatatgaaacctgtaagatcaggaccataaaagctggcaccttggagaagcttgtggagaacctgctgacagcttttggggacaatgactttacctatatcagcatctttctttcaacgtacagaggctttgcctccactaaagaagtgctggaactactgctggacaggtatggaaacctgacaagcccaaactgtgaagaagatggaagccaaagttcatcagagtccaaaatggtgatcaggaatgcaatcgcttccatactaagggcctggcttgaccagtgtgcagaagacttccgagagccccctcacttcccttgcttacagaaactgctggattatctcacacggatgatgccgggctctgacccagaaagaagagcacaaaatcttcttgagcagtttcagaagcaagaagtggaaactgacaatgggcttcccaacacgatctccttcagcctggaagaggaagaggaactggagggtggagagtcagcagaattcacgtgcttctcagaagatctcgtggcagagcagctgacctacatggatgcacaactcttcaagaaagtagtgcctcaccactgcctgggctgcatttggtctcgaagggataagaaggaaaacaaacatttggctcctacgatccgtgccaccatctctcagtttaataccctcaccaaatgtgttgtcagcaccatcctggggggcaaagaactcaaaactcagcagagagccaaaatcattgagaagtggatcaacatcgctcatgaatgtagactcctgaagaatttttcctccttgagggccatcgtttcggcactgcagtctaattccatctatcggttaaaaaagacttgggctgccgtcccaagggaccgaatgctgatgtttgaagaactttcagatatcttctcagaccataataaccatttgaccagccgagaactactgatgaaggaaggaacctcaaaatttgcaaacctggacagcagtgtgaaagaaaaccagaagcgtacccagaggcggctgcagctccagaaggacatgggtgtgatgcagggaactgtgccctacctgggcaccttcctgactgacctgaccatgcttgacactgcccttcaggactacatcgagggtggactgataaactttgagaaaaggagaagggaatttgaagtgattgcccagataaagctcttacagtctgcctgcaacagctattgcatgaccccagaccaaaagttcatccagtggttccagaggcagcagctcctgacagaggaggagagctatgccctgtcatgtgagattgaagcagctgctgacgccagcaccacctcgcccaagcctcggaagagcatggtgaagagactcagcctactgtttctagggtctgacatgatcaccagtcccactcccaccaaagagcagcccaagtccactgccagcgggagctctggtgaaagcatggactctgtcagcgtgtcatcctgcgagtcgaaccactcagaggctgaggagggctccattactcccatggacacccctgatgagcctcaaaaaaagctctctgagtcctcctcatcctgttcttctatccattccatggacacaaattcctcagggatgtcttccttaatcaaccccctctcctcccctccgtcctgcaacaacaaccccaaaatccacaagcgctctgtctcggtgacgtccattacctcgactgtgctgcctcctgtttacaaccaacagaatgaagacacctgcataatccgcatcagtgtggaagacaataacggcaacatgtacaagagcatcatgttgacgagccaggataaaacccccgctgtgatccagagagccatgctgaagcacaatctggactcagaccccgccgaggagtacgagctggtgcaggtcatctcggaggacaaagaacttgtgattccagactcagcaaatgtcttttatgccatgaacagccaagtgaactttgacttcattttgcgcaaaaagaactccatggaagaacaagtgaaactgcgtagccggaccagcttgacgttgcccaggacagctaaacggggctgctggagtaacagacacagcaaaatcaccctctgaagggagggaccagtggccccttgtttgccaaaggcagagtggggctgagaaacaggctgcggtgattgcaattaccatccggtgttcgaggatcattggtgaagtcagcagatatttattgagttcctgtggtgtgcaaagcattatgataggcaccgtggggaaactggaaatgaatttgacatgaaaaggatgaacgattcactgattctctttgactcatttgagactaaaatgcagaattaccaacatttaaaacatatatatgcacatgtatttggtatgcatgtgtatctatataaaaatatataagagggactttatgggatagtatggactatggaaaaacaaatttgcacaatggcctgggaagttgaggtcactttttacagggaaatagaagaaactgagaacctagtctcgtatattctgagtaaatggaatcagtcctgggaatagagagtgtcctttgtgccagtattacaagaagcccaaactttatttttataaagggagaggatgactttctcaatcaagtgccaccagataaaaacaactgcagaggctggaactgccacaggctgtatgaaaggccactttggaaagggtttggatgagctggtggccttcaacctctgcctgcatctgccactttctgctaccctagggaggccaggaggagcttcggaggaccatcgccccactggtctagccatcatgacacctctggaggtgtcaagctcctgaaacaagctcatttcagtttctggcaaccccgtgtatttccgttttccccctaaagaacatatcataatcattgcacaaataaccatgttctttggtaatgaagccagaaaagaaagcgcaaaagaatggtgactcatttggactcttatctgtcttggaatgtcactgcttcattgccttctctgattgccttttgcatgtaaaactatgtgtctggagtcttttgccatctggatcttagtacctctttattatgtgcaatttattcctcaggtgtggaaatttctactgcaattgactacgtttgattattttgagcttgtgaaagatttctgaacagtgattgtcccgttaatagcccctcagaagatgttccctgctgataacagcatcctattttacttacttttatagcattactgtgcctagtcgtggggaaagagatggggctgtatagattatctgaatcatttgtctaagaggtacattcttccagatggaatcaataacttttttttttccaggttcccgtgcttgctatcacagtatcattgttaagtgacacttttgtctctcataacaccatcacactcttccttccaagtctgagctgtgctggggtttgaactaaaagccatatgtggaatattgacatgtgtaagaagcactttcagaatgttgtcctttttaagaaatgattctcaaaataccagtttttattccaaaaatttagagaacaaacccggaatatgaagtgcagattgtaacatggagctatttttttttcttaatcccataatacagctcctaaaagttgtgtgggatttgcgttgcataaatagccatgtgaattccacaagaagcaccagggaaagtttagagatttgcggcaatggaccgaagaacgggccaggaagtcctccaatttcctttggtctttccaggagattggactacacattgtaaagactgactgggtttcaactagtcaaaaagcactttcttctgttttcaatccctgttcgatttgtgcttctgtgcttgtaggagagatggccagggtggcagccctcatgcaggttgaagtatatgtagcctcagcctgatattcttggtgcgaaggtaaaaaaaaaaaaataaataaaaccattggcctggttgagggcgtgaccaccaagacatatatgttgtgcccgtgttcatcctgtgtatttatactgtatatgtagagtctagatttatatactgcaatgtaaaatatatatatatttaccttttttaaagacaatggaaattccaagtagctaaaacttagcttcatttatttaatgccactttaaatgtcttaaatttgtttcctggtggacagccgggtaatgcttttagctgctcgcatgcttgtctttctgcatctccatcatctgtttaccttttggttaaactaataaactagtttgggacttggctggcatgtgctgccagacccaaaggga

SEQ ID NO: 426 - protein, 803 aa, Homo Sapiens
MEVKPVGEPTQEVSKFKLSTKVESTGHWLVEDHVRIWEVLKTEESSIQDWGEEVEEGAVYHVTLKRVQIQQAANKGARWLGVEGDQLPPGHTVSQYETCKIRTIKAGTLEKLVENLLTAFGDNDFTYISIFLSTYRGFASTKEVLELLLDRYGNLTSPNCEEDGSQSSSESKMVIRNAIASILRAWLDQCAEDFREPPHFPCLQKLLDYLTRMMPGSDPERRAQNLLEQFQKQEVETDNGLPNTISFSLEEEEELEGGESAEFTCFSEDLVAEQLTYMDAQLFKKVVPHHCLGCIWSRRDKKENKHLAPTIRATISQFNTLTKCVVSTILGGKELKTQQRAKIIEKWINIAHECRLLKNFSSLRAIVSALQSNSIYRLKKTWAAVPRDRMLMFEELSDIFSDHNNHLTSRELLMKEGTSKFANLDSSVKENQKRTQRRLQLQKDMGVMQGTVPYLGTFLTDLTMLDTALQDYIEGGLINFEKRRREFEVIAQIKLLQSACNSYCMTPDQKFIQWFQRQQLLTEEESYALSCEIEAAADASTTSPKPRKSMVKRLSLLFLGSDMITSPTPTKEQPKSTASGSSGESMDSVSVSSCESNHSEAEEGSITPMDTPDEPQKKLSESSSSCSSIHSMDTNSSGMSSLINPLSSPPSCNNNPKIHKRSVSVTSITSTVLPPVYNQQNEDTCIIRISVEDNNGNMYKSIMLTSQDKTPAVIQRAMLKHNLDSDPAEEYELVQVISEDKELVIPDSANVFYAMNSQVNFDFILRKKNSMEEQVKLRSRTSLTLPRTAKRGCWSNRHSKITL

SEQ ID NO: 427 - DNA, 1077 bp, Homo Sapiens
acgtatatacagagcctccctggccctcctggaaagagtcctggaaagacaaccttcaggtccagccctggagctggaggagtggagccccactctgaagacgcagcctttctccaggttctgtctctcccattctgattcttgacaccagatgcaggatggtgtcctctccctgcacgcaggcaagctcacggacttgctcccgtatcctgggactgagccttgggactgcagccctgtttgctgctggggccaacgtggcactcctccttcctaactgggatgtcacctacctgttgaggggcctccttggcaggcatgccatgctgggaactgggctctggggaggaggcctcatggtactcactgcagctatcctcatctccttgatgggctggagatacggctgcttcagtaagagtgggctctgtcgaagcgtgcttactgctctgttgtcaggtggcctggctttacttggagccctgatttgctttgtcacttctggagttgctctgaaagatggtcctttttgcatgtttgatgtttcatccttcaatcagacacaagcttggaaatatggttacccattcaaagacctgcatagtaggaattatctgtatgaccgttcgctctggaactccgtctgcctggagccctctgcagctgttgtctggcacgtgtccctcttctccgcccttctgtgcatcagcctgctccagcttctcctggtggtcgttcatgtcatcaacagcctcctgggccttttctgcagcctctgcgagaagtgacaggcagaaccttcacttgcaagcatgggtgttttcatcatcggctgtcttgaatcctttctacaaggagtgggtacgaattataaacaaacttcccctttaggtatccctggagtaataatgacaacaaaattcactgcaggtcggtggaatgatagaatgcattttaaatcacattgtaaacttccaggtgatccatggataggataaataactaagttattataattgtttaggaatttatagtccataaaatatcctccagccagggaaaaaaaaaaaaaaaaaa

SEQ ID NO: 428 - protein, 209 aa, Homo Sapiens
MVSSPCTQASSRTCSRILGLSLGTAALFAAGANVALLLPNWDVTYLLRGLLGRHAMLGTGLWGGGLMVLTAAILISLMGWRYGCFSKSGLCRSVLTALLSGGLALLGALICFVTSGVALKDGPFCMFDVSSFNQTQAWKYGYPFKDLHSRNYLYDRSLWNSVCLEPSAAVVWHVSLFSALLCISLLQLLLVVVHVINSLLGLFCSLCEK

SEQ ID NO: 429 - DNA, 9306 bp, Homo Sapiens
gggttcggagcgcgaagccgccgctgggtcctcggcgcgccccgcgtctgcgcttgctgccgcgccccggtcggcgcgctgggagttccagccatgctcttctggcacacgcagcccgagcactacaaccagcacaactccggcagctacctgcgtgatgtgctcgctctgcccatcttcaagcaggaggaaccccagctgtcccccgagaacgaggcccgcctgccacccctgcaatatgtgttgtgtgctgccacgtccccagccgtgaagctgcatgaagagacgctgacctacctcaaccaaggtcagtcttatgaaatccgactactggagaatcggaagctgggagactttcaagatctgaacacaaaatatgtcaagagcatcatccgtgtggtcttccatgaccgccggctgcagtatacggagcaccagcagctggagggctggcggtggagtcggccaggggaccggatcctggacatcgatattccactgtctgttggtatcttggaccccagggccagcccgacccagctgaatgcagtcgagtttttgtgggaccctgcgaagagagcttctgcattcattcaggtacactgcatcagcacagaattcacccccaggaagcacgggggcgagaagggagtgccctttcgagtccagattgacacgtttaagcagaacgagaatggggagtacacggagcacctgcactcagccagctgccagatcaaggtgttcaagccgaagggagccgatcggaaacagaagactgaccgggagaagatggagaaaagaactgcccaagagaaggagaaataccagccgtcctatgaaaccaccatcctcacagagtgctctccatggcccgacgtggcctaccaggtgaacagcgccccgtccccaagctacaatggttctccaaacagctttggcctcggcgaaggcaacgcctctccgacccacccggtggaggccctgcccgtgggcagtgaccacctgctcccatcagcttcgatccaggatgcccagcagtggcttcaccgcaacaggttctcgcagttctgccggctctttgccagcttctcaggtgctgacttgctgaagatgtcccgagatgatttggtccagatctgtggtcccgcagatgggatccggctcttcaacgccatcaaaggccggaatgtgaggccaaagatgaccatttatgtctgtcaggagctggagcagaatcgagtgcccctgcagcagaagcgggacggcagtggagacagcaacctgtctgtgtaccacgccatcttcctggaagagctgaccaccttggagctgattgagaagatcgccaacctgtacagcatctccccccagcacatccaccgagtctaccggcagggccccacgggcatccatgtggtggtgagcaacgagatggtgcagaacttccaagatgaatcctgttttgtcctcagcacaattaaagctgagagcaatgatggctaccacatcatcctgaaatgtggactctgagcagcagtggacctcatacctgtctccagctcccagccctgtggatccccgtggatgtagacattgccccactgtaagctgtggcctcaccaggcaagctgaggccaggagggaccctgcccagtctgtgaaagctacagagcaccaaccagcagaagcctgtggacaccaagtacggtgtacagaaagccagtggctcctttctcccttcctcttggcctccagattttgaatggttccttgttcttttctattggtccaaccctgacgttctaaaagggcaaacagtggagacgtctgctctgaaatccctcatcccttagttggaagctgattgggtatcttggtgctgcctgtattggtcccttctgaccactctcctgcctccagagaaagctctgcttcaccctggaagctggtacctttacctcctcctctgggagttggctgcatggccagcactgccgacttgatgggagcagtttgccctcattctcctgtttcaggtttgcttcccttctcagtgaccctggtgagcatccgcctttcctgttcttggatgaattgatgggagtggggctattctgtgccttctacctctttcttctctacgttgtttctaaggatctgctgctgcggaacccaaagatgtgctcctgtctctgcactggcgcattggcatggtagatgccacaatgtatgtgcacggcctttctcagagacattagttctgaggccctttgtggggaggttagggggatggtaatagaaaaagactattttatttcctggcaatcacgggtaaggaggattaggaatgagtattccattcctaggtgtcatcagatgaccttgaccaccacaataccaggccctcttggatggacttatagaaagttagagaagaccttgttgaaccgctgctaaacttgccacaggagcgatgtgttttctctgagtgcccctcacttacatgtttatctttgtttgtagaggctatgtttaggatattttgcctgcatcagaatgggtgcatcatctttcttaatggcctaactatcgggaaatttgagtgtcagtaactgtggtagactcagaaattcgtctttgtcttgcctctggttcctgggatccagtgatctctactggcccagggcttcagctcttggttaatttaggttcatggggaaccctctgaccacctgaatgggatgtcatagcttctaaatggagcttctgtggaatgaagtgctagactgaaggactaccagaataaaacagggtctacaatggggagaacttgttttatagatgaggaaaccaaggctcagaggggcaaagtcacctgcatggtagcacatagtgatagggtagcgatataaatttatcatataaaccaggacatctcggaataaaaggggctctgttagtcattatgttgggtaatagccgtggcattcctacagaacagagtgaggacaggctcctgattcctcttccttctttagaggagaagcggggagtgggttaactaacagctttattgagatgtcattcacatgccattcagtttacccattgctagtgtccaattgtattcacagaaccaccatcaattcacagaattacagtcaacgttggtacattttcatcacccccagtaaaaccccgtacccttggtctgtcactcctgctttcctaactcctgcagtccaaggcagccatgaatctactttctatgtaagattaacctactctggacatttcatatatctggaatcatgtgatatctcttttgtgactggcttcttccactgaatgttttctagggccgtccaagttgaggatgtatcagtacttcattcttttgtattgctgaataatacttcattgtatagatagaccacatttgtttattgattcatcagttgatggacatttgtgtgtttttactttttggctactctgaatgatgctgctatgaacatatttctacaagattttgtgtggacatatgttttcatttcttttagcaatatacataggagtggaattgctaggtcttacagtaactccgtgttttaactttttgagaaactgccagactgttttctatagcagctgtaccattttacattcccaccagcaatgtatccaggtttcaatttgtctacatcctcatcaacacttgctattatctgtctttttgcttttagcatcctaatgagtatgaaatgctatcttgtggttttgatttgcattcccctgatggcaactgatgctgagtgtcttttcctgtgcttacgggccatgcgtatttctttggagaaaggtctatccaggtcctttgcctatttttaattgagttgtctttttttttttaagttttctgttttcctaaccactagactaccagggatgagccttctttttattattgagttgggtgagctatttgtatattctagacgccagtcttttatcaggtatatgactggtaaaaatgttctccccttctgtggattgttttcagtttcttgttggtgtcctttgagacacaaaactttttaactttgatgatttccaagatacgtattttttttctattgtcacttgtgcttttggtgccatatctagaaaaccattgcctaatccaaggtcaagaagattaatgcctgtgttttcttctaagaactatacttttagttctcacaatggtctttgatccatttcgagtatatttttatatatgatgtgatgtaggggtccagcttcattcttttgcttgtggatctccacttgtcccactgctgattattgagaaaaatatcctttctccacggaattgtcttggcatccttgctaaaggcctctgcttcttactggatcttctttcctgggacatggtgtcgttgggaagcttaccttttttttttttttacttagtctgtgtttggttccaccagttttatgctgcctttctactctgttcttgctgtctccctctttacctgagtcaacggtactgagtcctatctctctctgatgttccccagtcttccttggtgcatgttctagctccacacactagtccttggaggaaggttgagaccaatgatttcctgttatgagtcatgaggaaactgaatcacctagaagtggaataatgtgctcagggtcaccatagcccattagtggaaggaccaggactagacctttagtcttctgaggtccagccccttaggctgtctgtcatcactgtacccaagtgatgtcactaccaaggccaaatgatggtgggctaaattttaattctcaaaagtgtaggaggctaatattgtcttctaagttccaaaagaagatgtaataaaagtctgttaccttaagtgtgctattagtagagtcttccatttttctggcatgcccctggcatctgctcttcttaccttctcgtggttgtagttaaagcttatagcttatgaaagaatagaaaataataaataccaaaaaaaagtacacatggtaatttggtaccaaaatatctcagctgcctaatttagcagctcatcccttccacaggggtcagatgagctaaagctccaggttttatttttcatttgattgacatacagaaaagccatagcccttcccacagctgtccagggtctttcctgtgagtccggaggtgctggcctattgagcaggacagctcttcccagggcattcccaccaacctgtggcttctgaactgtagcttctttttacagtgaaccccagagggaaataagacagacacatgtgctcaggccaccatcttgaactggaagcccaaagctgagttccttactcttaggtcgtcacggtttttgcggggtatctgcaaggttgagataaaccctttcctgtttaccaggttgtcctttctggatgaagggacagaggctgttgaatggaggaataataggtttgctggaggaggggcatggtatgcctgtggaaaggacaggatggggtggggaggtcgaggctttgacttggggtcctaaacaaaggtcaggtgttgccctagtgacctcttgcccagacagcccagagccccttacacagagctattaacctagggaaggctttaccagcagtggactggagccagccagggtcacaagtttccaagtccagcattgcttcaggggctggcctgagtaactgaagatctgaaaatcattaacaagtcgatgaaataaacggaaaagcctcttaggctgttgtcagtggagcagagggagaaagtccctaggcgctcagagggggtgagaaagcagtggatgattgggcgggggtgggggattagatgttgacactgcctggggtgtaggaagaggaacagagaacccagagtcagggtcctagatcccagaccctcgctcagtatgagtctctttgcctctctgggtctctatctcctcctcttacaaatacaggcttggtgatctctgaagatggcaccaacctgccatgaaatgaatctgaggggttttcccatttttccctccatcaaaatcgtacaaaaagctggacgtggtggcccatgcctctaatcctagcattttgggaggccgaggtgggagaatcacttgacgccaagagttcgagaccagcctgggcatcgtagtgagactccatctctgtctttttgaaaataaaaaatctttgaaaattgcacaacaggcaggagacctttacgtgtgcccatcctggttgtacacagtgccaccagtgctcctgcagtgcaaggcggcatgcttcttgacatgggtcagattgtgtccatcgtgtctttgggaatcagccctagctcctaactgggctgactacttcctccgcaaacttatgggggctcccagatattccttgccagccaggggccagacacagtgcaggcacagtctgtgtcattggtgcacatgtgcgtgtttacatgtgtacctgggttccttcccttgcccatgaatttgccatgagcacagccagaagcagcctcagcttggcaaggtgtggagatgactgctgttcccttcgcatttggggaaaacaggctccctcggtagctcgatgatcctcttttgatcttgtgtgacctcctggagagtggatgaagctggtggccttagcttttctagacagtgtaagtggcactgggcaaggcccccagagcagggcaaggtctctagagcgggtctcccacatgactggcttcacacaggcacttccgctcgggttgcatgctctgtgtcatcttaccggtccagggttgcaggtaggaaatgtttgtaccctcttctgattgccacctccttcccatcgccccttagggacagggcttgagggccagtgaggcgctggtcaggcaccccaggcctccttgggacctgcccaggggcaccctgagagctcctgaaacccccacttagcttccagacctttctgcaaaagctcctcctggctttcctccctcccccaatctatgggtcacagctaacagatctgagggcaactgctgtgctagtggccagggctgcacctgccatccccggctctgccactttagggccttctagaggcagtgtccttaggaagtagctctgaggcatgggttttctgctcctgtgcagggcagctgatgggataaggtggggaaggacggtcagtgcttgggccccagctggccagcctggcgatggggaaaccaaaccatgtcccccagcgaagggccagagtgggaacctgtcctcatgcccttcgtcctgaggagccctgaggtgggcagcaggggccaggggaagttttcaggccttcatcaaagagaacaacatcctcagctccgcacccctcatcctgtatcagcacttaccggtgtgtgactgcccttgtcagctagcatacggtgggcccacctggcccactggctgtttatgccactgatttatgatagggaatattatctttgaacccaatgaagtgttttctcccccatcacaaaaaaaaaaattcttatttttagtagacatgtatttaccaaaaatatgtactcaattattgtattttggattttatcaatttaaaaattgtggaaatttgtttgctcttacgccaacataatattgattttgcctcttggctctgaaagcccaaaatatttaccgtctagcccgttacagaaaaagtctgctgactactgagccagacctccattacctccatccctgttggattatttaaagaaagcctcagacagtaagggcttttttaaaagaataaaatgacttggtttgcgcttggaagcaggggaagcattcagatgagcggtttctgcattaaccctgcctatcacgcatctcgtgtcctgtgtggctggcgagccccccttggaaggttctggtgcttcagctggctcctgcagagtccaccccgcctcgtggtgggaatgcagagccctttgctttccttcttgccgcctgcttcctgttcctggggacccgctgggcctttggtctgcatcccctggccaggtccctcagggttgatgcgtggagaaggactttgagcagtggtgggcagcagtggcctcctggccagctcacactcttgtcctgggaggggcagcctgatctcacctccacctagtaccttggggactgaggaccttttggcttctctggagcctgcaagcctcttcccatgtgtccagctgctcttcctgctacaaaggggactgctcacagtggcctcagcttggtggttttgaggggccgccccccggccctccataagggtatcctgggcctgagaattctgcatctgccattggaggatggacagcctcaaatggaaggagtcccacgggagatgggtccgaggtccggctgtggccatccagccccctgtggcttgtccagcctctgtgcacccctggtgtcttcactccaggggcagacagcagccactgcagttcctttcttcgtgagtaacagtagtgatagcagctggggctaacaggctaggctttgtgttctgcgcatttggtcagcttctcactcgatcctccctaaagcaatggggaggcccccactagcccagttttcaggaagtcaactgggaggttagatgggggccagggtcccacagctactgatggcccgagccaggttgagcttcctggtgtccagtccggatcccacttgcagatctcatgctctcagataggtgggacaagttcttttgtcacagtgctggctctgtcctgaggcctcattgctggctgggtgtgctctgctgggaaaagctttgcggggcttgcttggttaaccacagaagagaaggggactgtttggggtgcctctctgcagcctccccgtgctgggtggaagcacggttactgtgttctctaatgttcatgtatttaaaatgatttctttctaaagatgtaacctccacacctttctccagattgggtgactcttttctaaaggtggtgggagtatctgtcggggtggtgtggcccttggatgggtcaggtgggtgtgagaggtcctggggaggtgggcgttgagctcaaagttgtcctactgccatgtttttgtacctgaaataaagcatattttgcacttgttactgtaccatagtgcggacgagaagtctgtatgtgggatctgtgcttgggttagaatgcaaataaaactcacatttgtaagaaaaaaaaaaaaaaaaaaaaaa

SEQ ID NO: 430 - protein, 479 aa, Homo Sapiens
MLFWHTQPEHYNQHNSGSYLRDVLALPIFKQEEPQLSPENEARLPPLQYVLCAATSPAVKLHEETLTYLNQGQSYEIRLLENRKLGDFQDLNTKYVKSIIRVVFHDRRLQYTEHQQLEGWRWSRPGDRILDIDIPLSVGILDPRASPTQLNAVEFLWDPAKRASAFIQVHCISTEFTPRKHGGEKGVPFRVQIDTFKQNENGEYTEHLHSASCQIKVFKPKGADRKQKTDREKMEKRTAQEKEKYQPSYETTILTECSPWPDVAYQVNSAPSPSYNGSPNSFGLGEGNASPTHPVEALPVGSDHLLPSASIQDAQQWLHRNRFSQFCRLFASFSGADLLKMSRDDLVQICGPADGIRLFNAIKGRNVRPKMTIYVCQELEQNRVPLQQKRDGSGDSNLSVYHAIFLEELTTLELIEKIANLYSISPQHIHRVYRQGPTGIHVVVSNEMVQNFQDESCFVLSTIKAESNDGYHIILKCGL

SEQ ID NO: 431 - DNA, 4488 bp, Homo Sapiens
agcgagagccacaagccacagcgctgagctgcaggcgcggcgaaacttccctctacccgcccggcccgcggcgcgcaccgttggcgctggacgcttcctccttggaagcgcctctccctcagttatggagaaaacttgtatagatgcacttcctcttactatgaattcttcagaaaagcaagagactgtatgtatttttggaactggtgattttggaagatcactgggattgaaaatgctccagtgtggttattctgttgtttttggaagtcgaaacccccagaagaccaccctactgcccagtggtgcagaagtcttgagctattcagaagcagccaagaagtctggcatcataatcatagcaatccacagagagcattatgattttctcacagaattaactgaggttctcaatggaaaaatattggtagacatcagcaacaacctcaaaatcaatcaatatccagaatctaatgcagagtaccttgctcatttggtgccaggagcccacgtggtaaaagcatttaacaccatctcagcctgggctctccagtcaggagcactggatgcaagtcggcaggtgtttgtgtgtggaaatgacagcaaagccaagcaaagagtgatggatattgttcgtaatcttggacttactccaatggatcaaggatcactcatggcagccaaagaaattgaaaagtaccccctgcagctatttccaatgtggaggttccccttctatttgtctgctgtgctgtgtgtcttcttgtttttctattgtgttataagagacgtaatctacccttatgtttatgaaaagaaagataatacatttcgtatggctatttccattccaaatcgtatctttccaataacagcacttacactgcttgctttggtttacctccctggtgttattgctgccattctacaactgtaccgaggcacaaaataccgtcgattcccagactggcttgaccactggatgctttgccgaaagcagcttggcttggtagctctgggatttgccttccttcatgtcctctacacacttgtgattcctattcgatattatgtacgatggagattgggaaacttaaccgttacccaggcaatactcaagaaggagaatccatttagcacctcctcagcctggctcagtgattcatatgtggctttgggaatacttgggttttttctgtttgtactcttgggaatcacttctttgccatctgttagcaatgcagtcaactggagagagttccgatttgtccagtccaaactgggttatttgaccctgatcttgtgtacagcccacaccctggtgtacggtgggaagagattcctcagcccttcaaatctcagatggtatcttcctgcagcctacgtgttagggcttatcattccttgcactgtgctggtgatcaagtttgtcctaatcatgccatgtgtagacaacacccttacaaggatccgccagggctgggaaaggaactcaaaacactagaaaaagcattgaatggaaaatcaatatttaaaacaaagttcaatttagctggatttctgaactatggttttgaatgtttaaagaagaatgatgggtacagttaggaaagtttttttcttacaccgtgactgagggaaacattgcttgtctttgagaaattgactgacatactggaagagaacaccattttatctcaggttagtgaagaatcagtgcaggtccctgactcttattttcccagaggccatggagctgagattgagactagccttgtggtttcacactaaagagtttccttgttatgggcaacatgcatgacctaatgtcttgcaaaatccaatagaagtattgcagcttccttctctggctcaagggctgagttaagtgaaaggaaaaacagcacaatggtgaccactgataaaggctttattaggtatatctgaggaagtgggtcacatgaaatgtaaaaagggaatgaggtttttgttgttttttggaagtaaaggcaaacataaatattaccatgatgaattctagtgaaatgaccccttgactttgcttttcttaatacagatatttactgagaggaactatttttataacacaagaaaaatttacaattgattaaaagtatccatgtcttggatacatacgtatctatagagctggcatgtaattcttcctctataaagaataggtataggaaagactgaataaaaatggagggatatccccttggatttcacttgcattgtgcaataagcaaagaagggttgataaaagttcttgatcaaaaagttcaaagaaaccagaattttagacagcaagctaaataaatattgtaaaattgcactatattaggttaagtattatttaggtattataatatgctttgtaaattttatattccaaatattgctcaatatttttcatctattaaattaatttctagtgtaaataagtagcttctatatctgtcttagtctattataattgtaaggagtaaaattaaatgaatagtctgcaggtataaatttgaacaatgcatagatgatcgaaaattacggaaaatcatagggcagagaggtgtgaagattcatcattatgtgaaatttggatctttctcaaatccttgctgaaatttaggatggttctcactgtttttctgtgctgatagtaccctttccaaggtgaccttcagggggattaaccttcctagctcaagcaatgagctaaaaggagccttatgcatgatcttcccacatatcaaaataactaaaaggcactgagtttggcatttttctgcctgctctgctaagacctttttttttttttactttcattataacatattatacatgacattatacaaaaatgattaaaatatattaaaacaacatcaacaatccaggatatttttctataaaactttttaaaaataattgtatctatatattcaattttacatcctttttcaaaggctttgtttttctaaaggctttgttttcctttttattatttttttcttttttatttttttgagacagtcttgctctgtcgctcaggctggagtgcagtggcacgatctcagctcactgcaacctcctcctcccaggttcaagtgattcttgttcatcagcctcccgagtagctgggactacaggcatgtgccactatgcccagctaatttttgtacttttagtagagacagggtttcaccacattggtcaggctggtcttgaaatgctggcgtcaagtgatctgcctgcctccgcctcacaaagcactgggattacaggcatgaatctggccttacgtaatatattttcttaatggctgcataatatcacatcaaataggcatttttcaaacctctttccttattaaacatgtagactatatccattttttactaaaataaataacatttcagataatatctttgcactgataatgttgccaagccatttctaaagtgaccttatcaatttaattaccattggatgagggtgttgctttcatcgcaccattgtagattgtcttttttatttcaatttgcgtttatttataactggttgcaaaggtacacagaacacacgctccttcaacttatctttgataaacccaagcaaggatacaaaaagttggacgacattgagtagagtcatggtatacggtgctgaccctacagtatcagtggaaaagataaggaaaatgtcactactcacctatgttatgcaaaacagttaggtgtgctggggctggatactgctcttttacttgagcattggttgattaaagtttaggtaccatccaggctggtctagagaagtctttggagttaaccatgctctttttgttaaagaagagagtaatgtgtttatcctggctcatagtccgtcaccgaaaatagaaaatgccatccataggtaaaatgctgacctatagaaaaaaatgaactctacttttatagcctagtaaaaatgctctacctgagtagttaaaagcaattcatgaagcctgaagctaaagagcactctgatggttttggcataatagctgcatttccagacctgacctttggccccaaccacaagtgctccaagccccaccagctgaccaaagaaagcccaagttctccttctgtccttcccacaacctccctgctcccaaaactatgaaattaatttgaccatattaacacagctgactcctccagtttacttaaggtagaaagaatgagtttacaacagatgaaaataagtgctttgggcgaactgtattccttttaacagatccaaactattttacatttaaaaaaaaagttaaactaaacttctttactgctgatatgtttcctgtattctagaaaaatttttacactttcacattatttttgtacactttccccatgttaagggatgatggcttttataaatgtgtattcattaaatgttactttaaaaataaaaaaaaaaaaaaaa

SEQ ID NO: 432 - protein, 459 aa, Homo Sapiens
MEKTCIDALPLTMNSSEKQETVCIFGTGDFGRSLGLKMLQCGYSVVFGSRNPQKTTLLPSGAEVLSYSEAAKKSGIIIIAIHREHYDFLTELTEVLNGKILVDISNNLKINQYPESNAEYLAHLVPGAHVVKAFNTISAWALQSGALDASRQVFVCGNDSKAKQRVMDIVRNLGLTPMDQGSLMAAKEIEKYPLQLFPMWRFPFYLSAVLCVFLFFYCVIRDVIYPYVYEKKDNTFRMAISIPNRIFPITALTLLALVYLPGVIAAILQLYRGTKYRRFPDWLDHWMLCRKQLGLVALGFAFLHVLYTLVIPIRYYVRWRLGNLTVTQAILKKENPFSTSSAWLSDSYVALGILGFFLFVLLGITSLPSVSNAVNWREFRFVQSKLGYLTLILCTAHTLVYGGKRFLSPSNLRWYLPAAYVLGLIIPCTVLVIKFVLIMPCVDNTLTRIRQGWERNSKH

SEQ ID NO: 433 - DNA, 1083 bp, Homo Sapiens
atggacccagaagaaacttcagtttatttggattattactatgctacgagcccaaactctgacatcagggagacccactcccatgttccttacacctctgtcttccttccagtcttttacacagctgtgttcctgactggagtgctggggaaccttgttctcatgggagcgttgcatttcaaacccggcagccgaagactgatcgacatctttatcatcaatctggctgcctctgacttcatttttcttgtcacattgcctctctgggtggataaagaagcatctctaggactgtggaggacgggctccttcctgtgcaaagggagctcctacatgatctccgtcaatatgcactgcagtgtcctcctgctcacttgcatgagtgttgaccgctacctggccattgtgtggccagtcgtatccaggaaattcagaaggacagactgtgcatatgtagtctgtgccagcatctggtttatctcctgcctgctggggttgcctactcttctgtccagggagctcacgctgattgatgataagccatactgtgcagagaaaaaggcaactccaattaaactcatatggtccctggtggccttaattttcaccttttttgtccctttgttgagcattgtgacctgctactgttgcattgcaaggaagctgtgtgcccattaccagcaatcaggaaagcacaacaaaaagctgaagaaatctataaagatcatctttattgtcgtggcagcctttcttgtctcctggctgcccttcaatactttcaagttcctggccattgtctctgggttgcggcaagaacactatttaccctcagctattcttcagcttggtatggaggtgagtggacccttggcatttgccaacagctgtgtcaaccctttcatttactatatcttcgacagctacatccgccgggccattgtccactgcttgtgcccttgcctgaaaaactatgactttgggagtagcactgagacatcagatagtcacctcactaaggctctctccaccttcattcatgcagaagattttgccaggaggaggaagaggtctgtgtcactctaa

SEQ ID NO: 434 - protein, 360 aa, Homo Sapiens
MDPEETSVYLDYYYATSPNSDIRETHSHVPYTSVFLPVFYTAVFLTGVLGNLVLMGALHFKPGSRRLIDIFIINLAASDFIFLVTLPLWVDKEASLGLWRTGSFLCKGSSYMISVNMHCSVLLLTCMSVDRYLAIVWPVVSRKFRRTDCAYVVCASIWFISCLLGLPTLLSRELTLIDDKPYCAEKKATPIKLIWSLVALIFTFFVPLLSIVTCYCCIARKLCAHYQQSGKHNKKLKKSIKIIFIVVAAFLVSWLPFNTFKFLAIVSGLRQEHYLPSAILQLGMEVSGPLAFANSCVNPFIYYIFDSYIRRAIVHCLCPCLKNYDFGSSTETSDSHLTKALSTFIHAEDFARRRKRSVSL

SEQ ID NO: 435 - DNA, 4390 bp, Homo Sapiens
gagttggggccagctccccacccccaagaggccccacattccgggccagcagcccagaaagtccctccccgcaggcggagacagccccaagaagtcgacgccccggtcccgccgcccggccactacccagagggctgccgccgcctctccaagttcttgtggcccccgcggtgcggagtatggggcgctgatggccatggagggctactggcgcttcctggcgctgctggggtcggcactgctcgtcggcttcctgtcggtgatcttcgccctcgtctgggtcctccactaccgagaggggcttggctgggatgggagcgcactagagtttaactggcacccagtgctcatggtcaccggcttcgtcttcatccagggcatcgccatcatcgtctacagactgccgtggacctggaaatgcagcaagctcctgatgaaatccatccatgcagggttaaatgcagttgctgccattcttgcaattatctctgtggtggccgtgtttgagaaccacaatgttaacaatatagccaatatgtacagtctgcacagctgggttggactgatagctgtcatatgctatttgttacagcttctttcaggtttttcagtctttctgcttccatgggctccgctttctctccgagcatttctcatgcccatacatgtttattctggaattgtcatctttggaacagtgattgcaacagcacttatgggattgacagagaaactgattttttccctgagagatcctgcatacagtacattcccgccagaaggtgttttcgtaaatacgcttggccttctgatcctggtgttcggggccctcattttttggatagtcaccagaccgcaatggaaacgtcctaaggagccaaattctaccattcttcatccaaatggaggcactgaacagggagcaagaggttccatgccagcctactctggcaacaacatggacaaatcagattcagagttaaacagtgaagtagcagcaaggaaaagaaacttagctctggatgaggctgggcagagatctaccatgtaaaatgttgtagagatagagccatataacgtcacgtttcaaaactagctctacagttttgcttctcctattagccatatgataattgggctatgtagtatcaatatttactttaatcacaaaggatggtttcttgaaataatttgtattgattgaggcctatgaactgacctgaattggaaaggatgtgattaatataaataatagcagatataaattgtggttatgttacctttatcttgttgaggaccacaacattagcacggtgccttgtgcagaatagatactcaatatgtgaatatgtgtctactagtagttaattggataaactggcagcatccctggcctgttgtcatgcagtcatttcctgttaattctgggagacaatgatttcacaactagcgggaagcagtcctaaaagtttaaaatccgataaggaatatctgggacagggtttagatcatgactctacacagataccatgatgagagtatattaaagaaatttaggaaagcacctggttcctttctccccatgcctgccttctgctccctccccagctggtttgggctcaaattgtccctggagactagggtttatgttagggtattgatagattagagcaggtggttgaagagatcttctctggtcagacttggaagaatttccaaaactgaagttagccccaagacttccctagggttgatgtactttatgatccagatgctaaacttcttagaatgaaaatatgcttcaacacttaagtagcatacactgccctacaaacctcagagagcacttttccccaagttcttgtttttatttttgaaagtactcacacagcacttactatgctccaaacactcctctaagcactttacacatattagctcattcagtccccagacagacgggatgaagtaggtattgttactgttcccattttacaggtgagagatttgaagcctggggaggctagtaactcaccccaaggtcacacggctcatacatggtgggactgagactcagatgcaggcagtctggcacctcagtctggattctaaccatttcactaagctatttttgtcttgtactactttgacccacccctgaataaacctcaattgctggagtggggtgtagttattaaagggatgctttttaccttttgctgtttgctgtggcagattccccagataaccaaggaaaaggggccacccatacctggaaataggccatagggcccctactactgccaacaagccatggcctaccttgacacttgtttgatcttaaaattgtgtcttggtaacaaaagatttggacaggcatatctgtagctttcaagttaattaattgcaatatttttttcttcaggattttagctgctgaacaactttcagtttggagctaaaagagacctgtctcatggtctgcccttccctggggcaatagctagggtctttcctgatttttatggaattttaggggatattttgagctttgggttctcagtagtgaattgagacttggaggtgacttttcatgtttggagtatcatctctgtctgggatctgggctgacaaattaaaacctagagtagtgcttatgctgaaatgatacttttcattttttggttgatttttttgccttcccttcaattttaaactgaagcattttaatatgggtagaaactctacaccaaatacactaaacattttggtgcttagtggatttctttttaggtaactggtacttacttccaaagactgaatacaagccacactccatcatatcccttaaacttcatgaaaaaccattcaagatccccttgctgcaacactgttctcttcttctctactaaattctatttccaaaattggtaatagagccagaaggatccccagtacccagccctctgcctggcacaaagtggtagcacaattaaattcagtatgggtggagcatggtacagtcttggtgccatagaaggagtagttgcatagtcacacatcatttgataagttggatgttccattacatagaggaacacaaaattccagggtttttggaggaagggattagatagtgactaagccgccagaattgaggtggccattcctttttgtataggctaagaaacaggttatcagtgaaaagttaattatggctttggcactagaatagcactgttgcaaagtatttaagcaccccccatctcagccctttattttatctttcatgtgggctaatgtgaggataatcttacagatattataggaatttcttttctatctttatgaaaacaacgtatataaaatatatctagaaaacctttgtttgagactcttatttaatgggcttttgattctaatgataattgtacctttatctttcaaaagctgatatttcctacctaagcatctcccgagaaaaatatctcattaaaaagcccataaataataggggagaagaaagccttaggtatcaattccaaaacagtgattgaaatttcccaaaataattatggcttctgtcatctccagagataatctggcttggtttaccccataatctaatttcagaaaagaaagctttattttaacactcatctgaatcaacattaaagccttttctctcaaagcgtttattgagaaactcaaatgaatatactttttgaattactgtcatcaaaagtgtacggcttcctgtgctgcttgtgtcaaatggaacctgccctctaaagcactttctttcctttacttgcgtggtttcatgtaagctgtgctgtttagaaacaacatctcagactttacaaagaaatgacaaagaaggcaattgcactttttaagggatatcgacaagcagtttctgttttctaaaggacaaaatacagagtgtgtgtcatttttaattagattctttcccctgctgagttggaaattccagtgcagcactgattgaccacagttgccaatctaaaagcacaaagacagaagtaaagctttatgctaattttatttcaatatgatagaaaatttatcttggtatgtccttttttagataactccagcaggaaactgtaactgctatgtctttaggaaaatgtagaagaaagaacattattgttctttaattcctacaaggtactcgaaaaccttaagtgaaaaagatttctatctttttatcttagcgcatttatggaaaaaatattaactatcctgaatattttataattttgtaggaaaaatatgcatctattttttcttgacttcttttatatagtaataaaagttattttggaagctcaaaaaaaaaaaaaaaaaaaaaaaaaaaaaaaaa

SEQ ID NO: 436 - protein, 286 aa, Homo Sapiens
MAMEGYWRFLALLGSALLVGFLSVIFALVWVLHYREGLGWDGSALEFNWHPVLMVTGFVFIQGIAIIVYRLPWTWKCSKLLMKSIHAGLNAVAAILAIISVVAVFENHNVNNIANMYSLHSWVGLIAVICYLLQLLSGFSVFLLPWAPLSLRAFLMPIHVYSGIVIFGTVIATALMGLTEKLIFSLRDPAYSTFPPEGVFVNTLGLLILVFGALIFWIVTRPQWKRPKEPNSTILHPNGGTEQGARGSMPAYSGNNMDKSDSELNSEVAARKRNLALDEAGQRSTM

SEQ ID NO: 437 - DNA, 2974 bp, Homo Sapiens
gcggccgagggggagcccgcgccgcggctgcagctgccaagggagcgttccgagcccacgtcaggggaggtgtcgggataaatagggtcccgcaatggccgtggctggctgcgctccgagctgcggagtccgggactggagctgcccgggcgggttcgcgccccgaaggctgagagctggcgctgctcgtgccctgtgtgccagacggcggagctccgcggccggaccccgcggccccgctttgctgccgactggagtttgggggaagaaactctcctgcgccccagaggatttcttcctcggcgaagggacagcgaaagatgagggtggcaggaagagaagggcgctttctgtctgccggggtcgcagcgcgagagggcagtgccatgttcctctccatcctagtggcgctgtgcctgtggctgcacctggcgctgggcgtgcgcggcgcgccctgcgaggcggtgcgcatccctatgtgccggcacatgccctggaacatcacgcggatgcccaaccacctgcaccacagcacgcaggagaacgccatcctggccatcgagcagtacgaggagctggtggacgtgaactgcagcgccgtgctgcgcttcttcctctgtgccatgtacgcgcccatttgcaccctggagttcctgcacgaccctatcaagccgtgcaagtcggtgtgccaacgcgcgcgcgacgactgcgagcccctcatgaagatgtacaaccacagctggcccgaaagcctggcctgcgacgagctgcctgtctatgaccgtggcgtgtgcatctcgcctgaagccatcgtcacggacctcccggaggatgttaagtggatagacatcacaccagacatgatggtacaggaaaggcctcttgatgttgactgtaaacgcctaagccccgatcggtgcaagtgtaaaaaggtgaagccaactttggcaacgtatctcagcaaaaactacagctatgttattcatgccaaaataaaagctgtgcagaggagtggctgcaatgaggtcacaacggtggtggatgtaaaagagatcttcaagtcctcatcacccatccctcgaactcaagtcccgctcattacaaattcttcttgccagtgtccacacatcctgccccatcaagatgttctcatcatgtgttacgagtggcgctcaaggatgatgcttcttgaaaattgcttagttgaaaaatggagagatcagcttagtaaaagatccatacagtgggaagagaggctgcaggaacagcggagaacagttcaggacaagaagaaaacagccgggcgcaccagtcgtagtaatccccccaaaccaaagggaaagcctcctgctcccaaaccagccagtcccaagaagaacattaaaactaggagtgcccagaagagaacaaacccgaaaagagtgtgagctaactagtttccaaagcggagacttccgacttccttacaggatgaggctgggcattgcctgggacagcctatgtaaggccatgtgccccttgccctaacaactcactgcagtgctcttcatagacacatcttgcagcatttttcttaaggctatgcttcagtttttctttgtaagccatcacaagccatagtggtaggtttgccctttggtacagaaggtgagttaaagctggtggaaaaggcttattgcattgcattcagagtaacctgtgtgcatactctagaagagtagggaaaataatgcttgttacaattcgacctaatatgtgcattgtaaaataaatgccatatttcaaacaaaacacgtaatttttttacagtatgttttattaccttttgatatctgttgttgcaatgttagtgatgttttaaaatgtgatcgaaaatataatgcttctaagaaggaacagtagtggaatgaatgtctaaaagatctttatgtgtttatggtctgcagaaggatttttgtgatgaaaggggattttttgaaaaatctagagaagtagcatatggaaaactataatgtgtcttttttacaatgacttcagctctgtttttagctagaaactctaaaaacaaaaataataataaagaaaaataaataaaaaggagaggcagacaatgtctggattcctgttttttggttacctgatttcatgatcatgatgcttcttgtcaacaccctcttaagcagcaccagaaacagtgagtttgtctgtaccattaggagttaggtactaattagttggctaatgctcaagtattttatacccacaagagaggtatgtcactcatcttacttcccaggacatccaccctgagaataatttgacaagcttaaaaatggccttcatgtgagtgccaaattttgttttcttcatttaaatattttctttgcctaaatacatgtgagaggagttaaatataaatgtacagagaggaaagttgaggttccacctctgaaatgagaattacttgacagttgggatactttaatcagaaaaaaagaacttatcttgcagcattttatcaacaaatttcataattgtggacaattggaggcatttattttaaaaaacaattttattggccttttgctaacacagtaagcatgtattctctataaggcattcaataaatgcacaacgcccaaaggaaataaaatcctatctaatcctactctccactacacagaggtaatcactattagtattttggcatattattctccaggtgtttcttatgcacttataaaatgatttgaacaaataaaactaggaacctgctatacatgtgtttcataacctgcctcctttgcttggccctttattgagataagttttcctgtcaagaaagcagaaaccatctcatttctaacagctgtgttatattccatagtatgcattactcaacaaactgttgtgctattggatacttaggtggtttcttcactgacaatactgaataaacatctcaatagtcaaa

SEQ ID NO: 438 - protein, 346 aa, Homo Sapiens
MFLSILVALCLWLHLALGVRGAPCEAVRIPMCRHMPWNITRMPNHLHHSTQENAILAIEQYEELVDVNCSAVLRFFLCAMYAPICTLEFLHDPIKPCKSVCQRARDDCEPLMKMYNHSWPESLACDELPVYDRGVCISPEAIVTDLPEDVKWIDITPDMMVQERPLDVDCKRLSPDRCKCKKVKPTLATYLSKNYSYVIHAKIKAVQRSGCNEVTTVVDVKEIFKSSSPIPRTQVPLITNSSCQCPHILPHQDVLIMCYEWRSRMMLLENCLVEKWRDQLSKRSIQWEERLQEQRRTVQDKKKTAGRTSRSNPPKPKGKPPAPKPASPKKNIKTRSAQKRTNPKRV

SEQ ID NO: 439 - DNA, 5496 bp, Homo Sapiens
agtcccattcagggaagcagccccggcggccagcagggagctcaggacagagcaggctccctgggaagcctccgggtgataggggtgttccagctgcggcgctctgggggttcagagggggatcttgaatgaacaaatgaatgaactgctttctgggcaaacagccacagccagaggagcctgtgattggcagaaagaagccagggtgtgcaagtctccccaacagcctcgagtggcctgcagtcacagggaaccctcaggaagaccttccgggcagagaccagagggaagcccatctctccagcagaactgcttggatttttctaccaggaggctcagggctctgcaacaatgatagcagaagctgatggcatctagagatctaggctgggactagcacagcatcacttctaccactttctgttggtcacagcaactcaccatgccagtgcagattcaaggggaggagaaatagagtccacttcttgatgggaggcgtgacatgtgtttctagctgtgtacagggactgattggctgaggactcacattggagagctgcagacaacataacggtgaatgagaatggaggatgaagattacaacacttccatcagttacggtgatgaataccctgattatttagactccattgtggttttggaggacttatcccccttggaagccagggtgaccaggatcttcctggtggtggtctacagcatcgtctgcttcctcgggattctgggcaatggtctggtgatcatcattgccaccttcaagatgaagaagacagtgaacatggtctggttcctcaacctggcagtggcagatttcctgttcaacgtcttcctcccaatccatatcacctatgccgccatggactaccactgggttttcgggacagccatgtgcaagatcagcaacttccttctcatccacaacatgttcaccagcgtcttcctgctgaccatcatcagctctgaccgctgcatctctgtgctcctccctgtctggtcccagaaccaccgcagcgttcgcctggcttacatggcctgcatggtcatctgggtcctggctttcttcttgagttccccatctctcgtcttccgggacacagccaacctgcatgggaaaatatcctgcttcaacaacttcagcctgtccacacctgggtcttcctcgtggcccactcactcccaaatggaccctgtggggtatagccggcacatggtggtgactgtcacccgcttcctctgtggcttcctggtcccagtcctcatcatcacagcttgctacctcaccatcgtgtgcaaactgcagcgcaaccgcctggccaagaccaagaagcccttcaagattattgtgaccatcatcattaccttcttcctctgctggtgcccctaccacacactcaacctcctagagctccaccacactgccatgcctggctctgtcttcagcctgggtttgcccctggccactgcccttgccattgccaacagctgcatgaaccccattctgtatgttttcatgggtcaggacttcaagaagttcaaggtggccctcttctctcgcctggtcaatgctctaagtgaagatacaggccactcttcctaccccagccatagaagctttaccaagatgtcatcaatgaatgagaggacttctatgaatgagagggagaccggcatgctttgatcctcactgtggaacccctcaatggactctctcaacccagggacacccaaggatatgtcttctgaagatcaaggcaagaacctctttagcatccaccaattttcactgcattttgcatgggatgaacagtgttttatgctgggaatctagggcctggaacccctttcttctagtggacagaacatgctgtgttccatacagccttggactagcaatttatgcttcttgggaggccagccttgactgactcaaagcaaaaaaggaagaattctcaaaagcattgccatgaactgggattggcatagggcggtgggattaagctgcctattgtgtgtgccccagaaatgacactctccaaggtccattcctggtgtgagcagtgagggggtcagagcaaacccagtgtgatgcagatcacacttggcccttgtatatatattatcagtagctggccagaaaaccctaccttcaagtcactgctctgtgttaaagtatgtggaaatgcataggtgatctgggagaggaaggtgacatatcagcccatgaactccataggccatgaatttggctttcggatcagctaggaagacagagaactggtcctgagaggtcctgtgggctctttgcaagggcaagacaagtgagggatgcaacgaggacttgagatttggcaaagaaatgagaaaggagaaaagaacctttaaaggatgcaggcatggagcagctcaccctagaacatcgcaggctgatggtgctttaggctggagctatttggggcgtcagggtggtgccagcccctgatctcaccttgcccctcttacctgggggtggggttgtggcaggcatcttcaccagcagccctcaccccatcacagggatttttttctgcctttcctaatccactcagctctggctggaggtgcttagaataaaacactggtggtggggcttctcattctggttaatttcctcaacgcctttggagacaggtccaaaatgcagctttgggaagcaactccggagagtcccctgggaagaagagtatgtccgaggactcagtcacttgagacagagtctggagctggactccttgaactgtgtttctgagctgcagacaccaaatacctcctggatacaggtgcctggcatggcttttctcatctaatactgacacgtccctgtggccacagagtgtcatagccccatttacaaatgacatagctgaggcccagatggggaaagtaacttgcccagcatcacacagctaatcagtggcagagttaagatctgaacctggctccgtctggctccagaaactctgttcttctatttggaatttatctgtggagattattctagtatattgatagcctacatttatttagcactttttatattatgcactttacatatgttttctcatttaatcattacagcaaccctgagttaggtatggttataacttcccttttacataggaggaatctgaggcttagagaggttaagtaacttgcccaaaggtacccagctagtctctgccggagcttggatttgaacttcagtttgcctggctcaaatgaggctgcagagttgggaaggacttaaaaagtttggagatttttgccataaatattgatttttctgcaaatgaggatgaacatcttaatggcctttaagaaactttgcaaatagttttcaaaaatgatgcaacatggcagagaaaatgcacttggcttccagctccctcaacagccattaacagcctcctaccgtggctcccacctcctatgtctccagagatcaaggcaatggggagggaaagctggcaggaggcagtcccttgtgggcctgaggccctttggctcctaagtgtccacattctgttctcttccaagtcccttcattgttaagctgattctccaacaagatgcaatgaacagatgcaatgtctaccccgcgctgggcgagttcccgaggccatgggctgtttggaatcacacttcattaagagacaaactgttccttcccttattgtgccttaatgcttatgacaaggcagctctgaattgatcccaagctggagcctctgaatgctttaaagagtttgaatatagacggtttgagagcaaaaagggagctttaaatattgctcagtggcccccatctcccctcttcccacatttactgaggcacgagatgggatgggacctgtcccgggtcacagcagcagtcgtcagcgccttggccctcctggcttgtaggatgctgcttttcctgggcttctggcagtccaggccaggatgggggagccaggaattcatgttgtcattggaaaagctgataaacaggagcacaattcaaaccggctgttttcctccttagagtctggcctccctctttctggctgctctgtgggtcttcctgttctgacttaggttcctgtcaagtacttaaatgcagccttaacatcccatacagtcttgtccccacagcttcatgtgaacatctccatgggtcatgcatatatcgtccctgcagtgtgcaaagtgtgctcacctgcactgctgcacaggcaaccaacatacttagtgcccagagccttctctctgggcccaggactcagtgatggggccttacttagccctgcctcctgggtggggtgggggagctgagggatcgtgaggacaagaggtagagggaaaagaaaagaagatggtgtttgaggataggggagggacaggagaggggacagaaaggtcccagagcatgatgatgaaggaaagggatctggcattcatgaagcacctacgatggttcaggcacaaacactgaaacctcaaattggccctggcagaaggggaccatcatagcaaggtggggggggggtgcagaaagtgagtttctgtttcaagaacagacttcactagttcagagttgcacagctagtgaggtatggagctgggctttgaatcaggtcagctgcctgaatgcccaacttcttcagcccttggaaggagagggtggggagaagaagaaggaaaagacaaggaagaaagaaagaagagagaaggggagaggaatggaagtccaaagagtgggaggaatttgatttcagaaccatctccagctgacccttgagccagcaaggacagggagaagggaagagcaagaacacgaagggcctcaagcaccgggatgcctttgccagccttagataattcccagagcgcacagagccctgcaggttcctgggtccttctccagagaagaggcacagagattctggcagcaaggttcagaaggggtgaggaaactgggcactgacaaagggaggggattggctcaaattcgaccccagagtcagctctggtggggttgggagcctggatgggtgggagaagatagaatccaatcgtgaaaaccataagggaccttcaaactcatcttgcccagatgtctcccatttcacagatgagggaactgaggttttgagagcttcccctgaggactctgcaaaacgaggtggtgtctggtttggatgaaagtggtcggtgattcctcaactcctgccctgcctccctctctcgttcctccctaacatgttatgctcttgttggggctgggatgccctaggcccaaggttaccaaatcctgggtttggaaaattgctgctgggggtggtatctaggaccagagaggaatctactatttctactgtgaaataattcagcagggggtcttcttacttcttccctttgaggacaaagtttctctcgaataaagagactgaagcaaga

SEQ ID NO: 440 - protein, 373 aa, Homo Sapiens
MRMEDEDYNTSISYGDEYPDYLDSIVVLEDLSPLEARVTRIFLVVVYSIVCFLGILGNGLVIIIATFKMKKTVNMVWFLNLAVADFLFNVFLPIHITYAAMDYHWVFGTAMCKISNFLLIHNMFTSVFLLTIISSDRCISVLLPVWSQNHRSVRLAYMACMVIWVLAFFLSSPSLVFRDTANLHGKISCFNNFSLSTPGSSSWPTHSQMDPVGYSRHMVVTVTRFLCGFLVPVLIITACYLTIVCKLQRNRLAKTKKPFKIIVTIIITFFLCWCPYHTLNLLELHHTAMPGSVFSLGLPLATALAIANSCMNPILYVFMGQDFKKFKVALFSRLVNALSEDTGHSSYPSHRSFTKMSSMNERTSMNERETGML

SEQ ID NO: 441 - DNA, 2820 bp, Homo Sapiens
gggagttcagacctagatctttccagttaatcacacaacaaacttagctcatcgcaataaaaagcagctcagagccgactggctcttttaggcactgactccgaacaggattctttcacccaggcatctcctccagagggatccgccagcccgtccagcagcaccatgtgggtgaccaaactcctgccagccctgctgctgcagcatgtcctcctgcatctcctcctgctccccatcgccatcccctatgcagagggacaaaggaaaagaagaaatacaattcatgaattcaaaaaatcagcaaagactaccctaatcaaaatagatccagcactgaagataaaaaccaaaaaagtgaatactgcagaccaatgtgctaatagatgtactaggaataaaggacttccattcacttgcaaggcttttgtttttgataaagcaagaaaacaatgcctctggttccccttcaatagcatgtcaagtggagtgaaaaaagaatttggccatgaatttgacctctatgaaaacaaagactacattagaaactgcatcattggtaaaggacgcagctacaagggaacagtatctatcactaagagtggcatcaaatgtcagccctggagttccatgataccacacgaacacagctttttgccttcgagctatcggggtaaagacctacaggaaaactactgtcgaaatcctcgaggggaagaagggggaccctggtgtttcacaagcaatccagaggtacgctacgaagtctgtgacattcctcagtgttcagaagttgaatgcatgacctgcaatggggagagttatcgaggtctcatggatcatacagaatcaggcaagatttgtcagcgctgggatcatcagacaccacaccggcacaaattcttgcctgaaagatatcccgacaagggctttgatgataattattgccgcaatcccgatggccagccgaggccatggtgctatactcttgaccctcacacccgctgggagtactgtgcaattaaaacatgcgctgacaatactatgaatgacactgatgttcctttggaaacaactgaatgcatccaaggtcaaggagaaggctacaggggcactgtcaataccatttggaatggaattccatgtcagcgttgggattctcagtatcctcacgagcatgacatgactcctgaaaatttcaagtgcaaggacctacgagaaaattactgccgaaatccagatgggtctgaatcaccctggtgttttaccactgatccaaacatccgagttggctactgctcccaaattccaaactgtgatatgtcacatggacaagattgttatcgtgggaatggcaaaaattatatgggcaacttatcccaaacaagatctggactaacatgttcaatgtgggacaagaacatggaagacttacatcgtcatatcttctgggaaccagatgcaagtaagctgaatgagaattactgccgaaatccagatgatgatgctcatggaccctggtgctacacgggaaatccactcattccttgggattattgccctatttctcgttgtgaaggtgataccacacctacaatagtcaatttagaccatcccgtaatatcttgtgccaaaacgaaacaattgcgagttgtaaatgggattccaacacgaacaaacataggatggatggttagtttgagatacagaaataaacatatctgcggaggatcattgataaaggagagttgggttcttactgcacgacagtgtttcccttctcgagacttgaaagattatgaagcttggcttggaattcatgatgtccacggaagaggagatgagaaatgcaaacaggttctcaatgtttcccagctggtatatggccctgaaggatcagatctggttttaatgaagcttgccaggcctgctgtcctggatgattttgttagtacgattgatttacctaattatggatgcacaattcctgaaaagaccagttgcagtgtttatggctggggctacactggattgatcaactatgatggcctattacgagtggcacatctctatataatgggaaatgagaaatgcagccagcatcatcgagggaaggtgactctgaatgagtctgaaatatgtgctggggctgaaaagattggatcaggaccatgtgagggggattatggtggcccacttgtttgtgagcaacataaaatgagaatggttcttggtgtcattgttcctggtcgtggatgtgccattccaaatcgtcctggtatttttgtccgagtagcatattatgcaaaatggatacacaaaattattttaacatataaggtaccacagtcatagctgaagtaagtgtgtctgaagcacccaccaatacaactgtcttttacatgaagatttcagagaatgtggaatttaaaatgtcacttacaacaatcctaagacaactactggagagtcatgtttgttgaaattctcattaatgtttatgggtgttttctgttgttttgtttgtcagtgttattttgtcaatgttgaagtgaattaaggtacatgcaagtgtaataacatatctcctgaagatacttgaatggattaaaaaaacacacaggtatatttgctggatgataaagatttcatgggaaaaaaaatcaattaatctgtctaagctgctttctgatgttggtttcttaataatgagtaaaccacaaattaaatgttattttaacctcaccaaaacaatttataccttgtgtccctaaattgtagccctatattaaattatattacatttcaaaaaaaaaaaaaaaa

SEQ ID NO: 442 - protein, 728 aa, Homo Sapiens
MWVTKLLPALLLQHVLLHLLLLPIAIPYAEGQRKRRNTIHEFKKSAKTTLIKIDPALKIKTKKVNTADQCANRCTRNKGLPFTCKAFVFDKARKQCLWFPFNSMSSGVKKEFGHEFDLYENKDYIRNCIIGKGRSYKGTVSITKSGIKCQPWSSMIPHEHSFLPSSYRGKDLQENYCRNPRGEEGGPWCFTSNPEVRYEVCDIPQCSEVECMTCNGESYRGLMDHTESGKICQRWDHQTPHRHKFLPERYPDKGFDDNYCRNPDGQPRPWCYTLDPHTRWEYCAIKTCADNTMNDTDVPLETTECIQGQGEGYRGTVNTIWNGIPCQRWDSQYPHEHDMTPENFKCKDLRENYCRNPDGSESPWCFTTDPNIRVGYCSQIPNCDMSHGQDCYRGNGKNYMGNLSQTRSGLTCSMWDKNMEDLHRHIFWEPDASKLNENYCRNPDDDAHGPWCYTGNPLIPWDYCPISRCEGDTTPTIVNLDHPVISCAKTKQLRVVNGIPTRTNIGWMVSLRYRNKHICGGSLIKESWVLTARQCFPSRDLKDYEAWLGIHDVHGRGDEKCKQVLNVSQLVYGPEGSDLVLMKLARPAVLDDFVSTIDLPNYGCTIPEKTSCSVYGWGYTGLINYDGLLRVAHLYIMGNEKCSQHHRGKVTLNESEICAGAEKIGSGPCEGDYGGPLVCEQHKMRMVLGVIVPGRGCAIPNRPGIFVRVAYYAKWIHKIILTYKVPQS

SEQ ID NO: 443 - DNA, 760 bp, Homo Sapiens
gaggaaccgagaggctgagactaacccagaaacatccaattctcaaactgaagctcgcactctcgcctccagcatgaaagtctctgccgcccttctgtgcctgctgctcatagcagccaccttcattccccaagggctcgctcagccagatgcaatcaatgccccagtcacctgctgttataacttcaccaataggaagatctcagtgcagaggctcgcgagctatagaagaatcaccagcagcaagtgtcccaaagaagctgtgatcttcaagaccattgtggccaaggagatctgtgctgaccccaagcagaagtgggttcaggattccatggaccacctggacaagcaaacccaaactccgaagacttgaacactcactccacaacccaagaatctgcagctaacttattttcccctagctttccccagacaccctgttttattttattataatgaattttgtttgttgatgtgaaacattatgccttaagtaatgttaattcttatttaagttattgatgttttaagtttatctttcatggtactagtgttttttagatacagagacttggggaaattgcttttcctcttgaaccacagttctacccctgggatgttttgagggtctttgcaagaatcattaatacaaagaattttttttaacattccaatgcattgctaaaatattattgtggaaatgaatattttgtaactattacaccaaataaatatatttttgtacaaaaaaaaaaaaaaa

SEQ ID NO: 444 - protein, 99 aa, Homo Sapiens
MKVSAALLCLLLIAATFIPQGLAQPDAINAPVTCCYNFTNRKISVQRLASYRRITSSKCPKEAVIFKTIVAKEICADPKQKWVQDSMDHLDKQTQTPKT

SEQ ID NO: 445 - DNA, 10607 bp, Homo Sapiens
attctgcgaggaatggcagcggcagcagcatccccgccagaggcggcggcggcggcggcagcggccacggccaccaccgcggacgctattgttccctggtgttagacgcgctctccctccttctcatctgaagcgaacaatagcaggaaagagctttgctttctgtactctttgaaaagacgttccaagagcggagaaaaattccctgccgagcgtgctacggctctggaccctggagtggctgcaggcggcatggggctgcaagccaggcgctgggcgtccgggagccggggcgctgcggggccgcgccggggcgtcctgcagctgctgccgctgccgctgccgctgccgctgctcctgctgctgctgctacgcccgggcgccggcagggctgcggcgcagggcgaggcggaggcgcccaccctctatctgtggaagactggtccatggggccgatgtatgggagatgaatgtggtcccggaggcatccaaacgagggctgtgtggtgtgctcatgtggagggatggactacactgcatactaactgtaagcaggccgagagacccaataaccagcagaattgtttcaaagtttgcgattggcacaaagagttgtacgactggagactgggaccttggaatcagtgtcagcccgtgatttcaaaaagcctagagaaacctcttgagtgcattaagggggaagaaggtattcaggtgagggagatagcgtgcatccagaaagacaaagacattcctgcggaggatatcatctgtgagtactttgagcccaagcctctcctggagcaggcttgcctcattccttgccagcaagattgcatcgtgtctgaattttctgcctggtccgaatgctccaagacctgcggcagcgggctccagcaccggacgcgtcatgtggtggcgcccccgcagttcggaggctctggctgtccaaacctgacggagttccaggtgtgccaatccagtccatgcgaggccgaggagctcaggtacagcctgcatgtggggccctggagcacctgctcaatgccccactcccgacaagtaagacaagcaaggagacgcgggaagaataaagaacgggaaaaggaccgcagcaaaggagtaaaggatccagaagcccgcgagcttattaagaaaaagagaaacagaaacaggcagaacagacaagagaacaaatattgggacatccagattggatatcagaccagagaggttatgtgcattaacaagacggggaaagctgctgatttaagcttttgccagcaagagaagcttccaatgaccttccagtcctgtgtgatcaccaaagagtgccaggtttccgagtggtcagagtggagcccctgctcaaaaacatgccatgacatggtgtcccctgcaggcactcgtgtaaggacacgaaccatcaggcagtttcccattggcagtgaaaaggagtgtccagaatttgaagaaaaagaaccctgtttgtctcaaggagatggagttgtcccctgtgccacgtatggctggagaactacagagtggactgagtgccgtgtggaccctttgctcagtcagcaggacaagaggcgcggcaaccagacggccctctgtggagggggcatccagacccgagaggtgtactgcgtgcaggccaacgaaaacctcctctcacaattaagtacccacaagaacaaagaagcctcaaagccaatggacttaaaattatgcactggacctatccctaatactacacagctgtgccacattccttgtccaactgaatgtgaagtttcaccttggtcagcttggggaccttgtacttatgaaaactgtaatgatcagcaagggaaaaaaggcttcaaactgaggaagcggcgcattaccaatgagcccactggaggctctggggtaaccggaaactgccctcacttactggaagccattccctgtgaagagcctgcctgttatgactggaaagcagtgagactgggaaactgcgagccagataacggaaaggagtgtggtccaggcacgcaagttcaagaggttgtgtgcatcaacagtgatggagaagaagttgacagacagctgtgcagagatgccatcttccccatccctgtggcctgtgatgccccatgcccgaaagactgtgtgctcagcacatggtctacgtggtcctcctgctcacacacctgctcagggaaaacgacagaagggaaacagatacgagcacgatccattctggcctatgcgggtgaagaaggtggaattcgctgtccaaatagcagtgctttgcaagaagtacgaagctgtaatgagcatccttgcacagtgtaccactggcaaactggtccctggggccagtgcattgaggacacctcagtatcgtccttcaacacaactacgacttggaatggggaggcctcctgctctgtcggcatgcagacaagaaaagtcatctgtgtgcgagtcaatgtgggccaagtgggacccaaaaaatgtcctgaaagccttcgacctgaaactgtaaggccttgtctgcttccttgtaagaaggactgtattgtgaccccatatagtgactggacatcatgcccctcttcgtgtaaagaaggggactccagtatcaggaagcagtctaggcatcgggtcatcattcagctgccagccaacgggggccgagactgcacagatcccctctatgaagagaaggcctgtgaggcacctcaagcgtgccaaagctacaggtggaagactcacaaatggcgcagatgccaattagtcccttggagcgtgcaacaagacagccctggagcacaggaaggctgtgggcctgggcgacaggcaagagccattacttgtcgcaagcaagatggaggacaggctggaatccatgagtgcctacagtatgcaggccctgtgccagcccttacccaggcctgccagatcccctgccaggatgactgtcaattgaccagctggtccaagttttcttcatgcaatggagactgtggtgcagttaggaccagaaagcgcactcttgttggaaaaagtaaaaagaaggaaaaatgtaaaaattcccatttgtatcccctgattgagactcagtattgtccttgtgacaaatataatgcacaacctgtggggaactggtcagactgtattttaccagagggaaaagtggaagtgttgctgggaatgaaagtacaaggagacatcaaggaatgcggacaaggatatcgttaccaagcaatggcatgctacgatcaaaatggcaggcttgtggaaacatctagatgtaacagccatggttacattgaggaggcctgcatcatcccctgcccctcagactgcaagctcagtgagtggtccaactggtcgcgctgcagcaagtcctgtgggagtggtgtgaaggttcgttctaaatggctgcgtgaaaaaccatataatggaggaaggccttgccccaaactggaccatgtcaaccaggcacaggtgtatgaggttgtcccatgccacagtgactgcaaccagtacctatgggtcacagagccctggagcatctgcaaggtgacctttgtgaatatgcgggagaactgtggagagggcgtgcaaacccgaaaagtgagatgcatgcagaatacagcagatggcccttctgaacatgtagaggattacctctgtgacccagaagagatgcccctgggctctagagtgtgcaaattaccatgccctgaggactgtgtgatatctgaatggggtccatggacccaatgtgttttgccttgcaatcaaagcagtttccggcaaaggtcagctgatcccatcagacaaccagctgatgaaggaagatcttgccctaatgctgttgagaaagaaccctgtaacctgaacaaaaactgctaccactatgattataatgtaacagactggagtacatgtcagctgagtgagaaggcagtttgtggaaatggaataaaaacaaggatgttggattgtgttcgaagtgatggcaagtcagttgacctgaaatattgtgaagcgcttggcttggagaagaactggcagatgaacacgtcctgcatggtggaatgccctgtgaactgtcagctttctgattggtctccttggtcagaatgttctcaaacatgtggcctcacaggaaaaatgatccgaagacgaacagtgacccagccctttcaaggtgatggaagaccatgcccttccctgatggaccagtccaaaccctgcccagtgaagccttgttatcggtggcaatatggccagtggtctccatgccaagtgcaggaggcccagtgtggagaagggaccagaacaaggaacatttcttgtgtagtaagtgatgggtcagctgatgatttcagcaaagtggtggatgaggaattctgtgctgacattgaactcattatagatggtaataaaaatatggttctggaggaatcctgcagccagccttgcccaggtgactgttatttgaaggactggtcttcctggagcctgtgtcagctgacctgtgtgaatggtgaggatctaggctttggtggaatacaggtcagatccagaccggtgattatacaagaactagagaatcagcatctgtgcccagagcagatgttagaaacaaaatcatgttatgatggacagtgctatgaatataaatggatggccagtgcttggaagggctcttcccgaacagtgtggtgtcaaaggtcagatggtataaatgtaacagggggctgcttggtgatgagccagcctgatgccgacaggtcttgtaacccaccgtgtagtcaaccccactcgtactgtagcgagacaaaaacatgccattgtgaagaagggtacactgaagtcatgtcttctaacagcacccttgagcaatgcacacttatccccgtggtggtattacccaccatggaggacaaaagaggagatgtgaaaaccagtcgggctgtacatccaacccaaccctccagtaacccagcaggacggggaaggacctggtttctacagccatttgggccagatgggagactaaagacctgggtttacggtgtagcagctggggcatttgtgttactcatctttattgtctccatgatttatctagcttgcaaaaagccaaagaaaccccaaagaaggcaaaacaaccgactgaaacctttaaccttagcctatgatggagatgccgacatgtaacatataacttttcctggcaacaaccagtttcggctttctgacttcatagatgtccagaggccacaacaaatgtatccaaactgtgtggattaaaatatattttaatttttaaaaatggcatcataaagacaagagtgaaaatcatactgccactggagatatttaagacagtaccacttatatacagaccatcaaccgtgagaattataggagatttagctgaatacatgctgcattctgaaagttttatgtcatcttttctgaaatctaccgactgaaaaaccactttcatctctaaaaaataatggtggaattggccagttaggatgcctgatacaagaccgtctgcagtgttaatccataaaacttcctagcatgaagagtttctaccaagatctccacaatactatggtcaaattaacatgtgtactcagttgaatgacacacattatgtcagattatgtacttgctaataagcaattttaacaatgcataacaaataaactctaagctaagcagaaaatccactgaataaattcagcatcttggtggtcgatggtagattttattgacctgcatttcagagacaaagcctcttttttaagacttcttgtctctctccaaagtaagaatgctggacaagtactagtgtcttagaagaacgagtcctcaagttcagtattttatagtggtaattgtctggaaaactaatttacttgtgttaatacaatacgtttctactttccctgattttcaaactggttgcctgcatcttttttgctatatggaaggcacatttttgcactatattagtgcagcacgataggcgcttaaccagtattgccatagaaactgcctcttttcatgtgggatgaagacatctgtgccaagagtggcatgaagacatttgcaagttcttgtatcctgaagagagtaaagttcagtttggatggcagcaagatgaaatcagctattacacctgctgtacacacacttcctcatcactgcagccattgtgaaattgacaacatggcggtaatttaagtgttgaagtccctaaccccttaaccctctaaaaggtggattcctctagttggtttgtaattgttctttgaaggctgtttatgactagatttttatatttgttatctttgttaagaaaaaaaaagaaaaaggaactggatgtctttttaattttgagcagatggagaaaataaataatgtatcaatgacctttgtaactaaaggaaatcaaaattatatgttgatttttctttctctctgatttcccagtttcagattgaatgtctgtcttgcaggcagttatttcaaaatccatagtcttttgcctttctcactggcaaaatttgaagcaatctctctcttcaatgtatgatttcaaaactaaaattttaaaagagaagaataaatatcttatccaagacttcattgcatatctagagcaagagtggcaaactttttctgtaaaggactatatagaaaatattttccacaaggtctatgttgcaacttctcaactttgccattctgctaatgcaatcttagtaaataaaagaatgaacataactgttttcctatataacttcccttacaaaaacagccagtaggccacctttgcaggtcatattttgctgacccctggtctggatgttttttaatgctagctctccatggtgtcatctttcgttttcattcatttttcaaaggtgagaatttacagtcattacatttcccactgtatcagaagtagctgtattttctacagatgtagccctgggaatggcacagtggaacaatatttaactaactcagcagacttcttgcaaatgaaaagaaaactcaaaaggtgccattaaaaagcaataccattttcaggcaacattattgcaacaacctttgtgagagaggacactagcttttcaggatatttgaaaaataatataactaacatgctattttatcttaaacagctgtgttcctgtaaaagtgttttggattagaaggtatttttaccttcatactggagtatgaactccccctgctgttcattagagtatttgcaaagattacaaaagacatcaggttaggatgtcattgtccccaaaatgaaaatatttgtatgtatttcaataagaactaaatgcagtaagcgctaattcctcattcaatattcactatattaggaaatgtaaatcatttcaaagagaacaggtagtcaggaagatgaaaattttactttaaagcaaggatttaaacaaagaaaaccataaaaacaaagtccattttatctgttttattaaagaggaagaaaaaataatattgttactttaaaactgtgattgtcaatatatataatcaggggtcttccagataatcctaaagttgatctctttgaataaaataaactccatttgtccaaaatagttaagaaagactctattgtggttacttgaaaaattcagctaaccctcttatgaaatgtgtgcaacacctattaattttgaaatgtgggatagaatacctactaaagctatatttaaggtattgtaaaatgtcattaattcagaaaagattagtatcatcctacctataagaattaaattagcaaatcaaaattatagaatgttatgaaaaatacattttattcataaattaattagattttacagcatatatgcatgcatatatatatatacacacacacacacacacacccatatatatgagagagaggaaattaggttcaacatgacctaatattagagaacatattggaaggtcactgtttgttaggataaataaatactggataacctcgttagaaaggtggaaagaggagaacgtagcaatctggctattttggacaaagggaaggttattatattcatgtttataacatgaaaatggccttatttttgtttctgacatgagacaataatgagttaaatattttattggaatttcatcaaaaccttatttttactgttccttctaaaaatttgggaggggaatatagtagtaacttctctattgacacttttacctcaccgagggggtaaaagatgtagaactgctgttccctagaatgaaggtctgttgtttggtttttaaaaaaagaagagcagaaaaagtttgacacagtattatatgattttgctggactatttcactagaaaccacgtagaataggactaactgatctcttttgaaaggggctgatttgcttattcatcaataactaatccaatatgtggacagtaatcttaatttcaaagccttttttgaggatactacggtgtagcttaagtgaatttaaaaagagtgcataaaagcttgtttttaattacttataacaaagcacaaattacttctaacaaggcaaatatttattgacatataagacattctgctaggcattgtaaaaaaaaaaaaaaaagtaatggcttttgtatacataggtacttaagacagacatccaaaagaaggaaaaaatgcttaatgagtgaagatagcactgaaacatgttgacttttactctaggtttgtttttagatggggttagtattttcccctacgtaatgtacatgtctttaggccacagtattaggagtttgatttttccctgccccaccctcaggtaggtggcagtggtcattgtagcttaatcagacccctgttaagttcctgggcatttcaaggtaaattcacgtcttccttctcacagaaattgaatagacctctcacacacttatttacctcccccaacaacctgtatccttggccctttctgattttctctgcttggtctctttctactcttgacagctattcttacctacttcccactaaacatgcccaattttttaattaaaaaaaaaagaattcctatatttccttccctattagaatcaaagtgtcactcactcagagtgtgaacatcctgatttacaccaaatccactggtcaaagaaatgaataaagggaaaaggaaaaatgtggaaggcatgcaggaaaaaaaaaaaaaaaaaagcccttttctgtaaaaatgtccatgcctacacttgctttagaccatcccatatcctcctgcctccatctcgagtctttgttcacattccacaccacaagacagtgagggaggactgtacttttcagtaccatacagaagggagagcctgttctaaagctgacgtgggtctcaatagtacatgagaagcacaattcccaaatgatctgggatctcctgtttataaatatattaccaaattcaagtgtgggttcttcttctatttccactgtaagattgagggtgttgaaaaaacagtagtccttgagcaaatctgtgaggaatcttgtcagaatgtgatctttcctgggactagtttagttgtgagaactacatctgcttgttctgggaataagggtctccccaggtcctgccctcaggtggccctggctgcaggacaggatttcaggtatcagaaactggtgtgtgagccaagcaaatagttatccatttataaaaaggatggtttgcagtgtgttataataattttatatctagcagggacaatgaaaaatggttatgtctacattattaaatgaatgaaactaatgctaaacagttaattttgcatttttatttttctgtgtttctaccaagtcagatcttaaaaatgggcagtatatgaagagctttagtttgtgggagtcatgttttcagtgatcaaaaatctctatattatttagaatataattgtcagtcttgttgtgttttgtagatttattgtttttaagccatagtttctagattacctacttttaaccctcaagtaaacttttccctatttttcagaaatctgtttgtgtttatttttagaaagtaaacatttagattccttttctggtactttttttctccatttctatcacacagatttgaagagatcagtatctatcattgtaaaatataactttattaaaatttgcaatctgtctttctataaattattattccctaaatgtgtattttatgttaatttaactacctgaatatttattttgtttaaataaggaggcagctgtctaagaatttttgttaatattactttgtaaattgcgtaatgtaatttattttacattatgtacatttcctttttaacgcacaaaatgtctatgtacaattaactacagatttgcaaataatgtcactaagctttattcagtcaatacagatggcatgtgaagatgtaatatgcttttttacattttcatatgggttatttgtaaataactatattgctgacaaacataaatacggaaatcattttcattctaaaaaaaaaaaaaaaaaaaaaaaa

SEQ ID NO: 446 - protein, 1657 aa, Homo Sapiens
MGLQARRWASGSRGAAGPRRGVLQLLPLPLPLPLLLLLLLRPGAGRAAAQGEAEAPTLYLWKTGPWGRCMGDECGPGGIQTRAVWCAHVEGWTTLHTNCKQAERPNNQQNCFKVCDWHKELYDWRLGPWNQCQPVISKSLEKPLECIKGEEGIQVREIACIQKDKDIPAEDIICEYFEPKPLLEQACLIPCQQDCIVSEFSAWSECSKTCGSGLQHRTRHVVAPPQFGGSGCPNLTEFQVCQSSPCEAEELRYSLHVGPWSTCSMPHSRQVRQARRRGKNKEREKDRSKGVKDPEARELIKKKRNRNRQNRQENKYWDIQIGYQTREVMCINKTGKAADLSFCQQEKLPMTFQSCVITKECQVSEWSEWSPCSKTCHDMVSPAGTRVRTRTIRQFPIGSEKECPEFEEKEPCLSQGDGVVPCATYGWRTTEWTECRVDPLLSQQDKRRGNQTALCGGGIQTREVYCVQANENLLSQLSTHKNKEASKPMDLKLCTGPIPNTTQLCHIPCPTECEVSPWSAWGPCTYENCNDQQGKKGFKLRKRRITNEPTGGSGVTGNCPHLLEAIPCEEPACYDWKAVRLGNCEPDNGKECGPGTQVQEVVCINSDGEEVDRQLCRDAIFPIPVACDAPCPKDCVLSTWSTWSSCSHTCSGKTTEGKQIRARSILAYAGEEGGIRCPNSSALQEVRSCNEHPCTVYHWQTGPWGQCIEDTSVSSFNTTTTWNGEASCSVGMQTRKVICVRVNVGQVGPKKCPESLRPETVRPCLLPCKKDCIVTPYSDWTSCPSSCKEGDSSIRKQSRHRVIIQLPANGGRDCTDPLYEEKACEAPQACQSYRWKTHKWRRCQLVPWSVQQDSPGAQEGCGPGRQARAITCRKQDGGQAGIHECLQYAGPVPALTQACQIPCQDDCQLTSWSKFSSCNGDCGAVRTRKRTLVGKSKKKEKCKNSHLYPLIETQYCPCDKYNAQPVGNWSDCILPEGKVEVLLGMKVQGDIKECGQGYRYQAMACYDQNGRLVETSRCNSHGYIEEACIIPCPSDCKLSEWSNWSRCSKSCGSGVKVRSKWLREKPYNGGRPCPKLDHVNQAQVYEVVPCHSDCNQYLWVTEPWSICKVTFVNMRENCGEGVQTRKVRCMQNTADGPSEHVEDYLCDPEEMPLGSRVCKLPCPEDCVISEWGPWTQCVLPCNQSSFRQRSADPIRQPADEGRSCPNAVEKEPCNLNKNCYHYDYNVTDWSTCQLSEKAVCGNGIKTRMLDCVRSDGKSVDLKYCEALGLEKNWQMNTSCMVECPVNCQLSDWSPWSECSQTCGLTGKMIRRRTVTQPFQGDGRPCPSLMDQSKPCPVKPCYRWQYGQWSPCQVQEAQCGEGTRTRNISCVVSDGSADDFSKVVDEEFCADIELIIDGNKNMVLEESCSQPCPGDCYLKDWSSWSLCQLTCVNGEDLGFGGIQVRSRPVIIQELENQHLCPEQMLETKSCYDGQCYEYKWMASAWKGSSRTVWCQRSDGINVTGGCLVMSQPDADRSCNPPCSQPHSYCSETKTCHCEEGYTEVMSSNSTLEQCTLIPVVVLPTMEDKRGDVKTSRAVHPTQPSSNPAGRGRTWFLQPFGPDGRLKTWVYGVAAGAFVLLIFIVSMIYLACKKPKKPQRRQNNRLKPLTLAYDGDADM

SEQ ID NO: 447 - DNA, 2799 bp, Homo Sapiens
agcttcgaggccagtgggaggagggaggggccaggcagctgagggccaggaaagatgtgaaaaactctagctggtgaccgagaggaggagtagagtgtgcccttagttcatatgaactagagggagttggtatttgcacagcagtcagggtcacatgagtgatcatggtacagtgagaagttctccctcccagggccaggtcacagggtttgtttctgttcaatccggattcttccagtaaaagcttcaacttcccacactgaagctgagagcctcccaaagtgctggctacctgctgagcgcccccgtaactctgacacagtagtaatttgagcctctgcaattgccgtctgcttcctgtgaaagtcctttccgtgcccactgacccttgagtgggcctttgagctgctgactttcagctggaacttgaagggaccccaaccctgagacactatggccctgacctcagacctggggaaacagataaaactgaaagaggtggaggggaccctcctgcagcctgcaactgtggacaactggagccagatccagagcttcgaggccaaaccagatgatctcctcatctgcacctaccctaaagcagggacaacgtggattcaggaaattgtggatatgattgaacagaatggggacgtggagaagtgccagcgagccatcatccaacaccgccatcctttcattgagtgggctcggccaccccaaccttctggtgtggaaaaagccaaagcaatgccctctccacggatactaaagactcacctttccactcagctgctgccaccgtctttctgggaaaacaactgcaagttcctttatgtagctcgaaatgccaaagactgtatggtttcctactaccatttccaaaggatgaaccacatgcttcctgaccctggtacctgggaagagtattttgaaaccttcatcaatggaaaagtggtttggggttcctggtttgaccacgtgaaaggatggtgggagatgaaagacagacaccagattctcttcctcttctatgaggacataaagagggacccaaagcatgaaattcggaaggtgatgcagttcatgggaaagaaggtggatgaaacagtgctagataaaattgtccaggagacgtcatttgagaaaatgaaagaaaatcccatgacaaatcgttctacagtttccaaatctatcttggaccagtcaatttcctccttcatgagaaaaggaactgtgggggattggaaaaaccacttcactgttgcccagaatgagaggtttgatgaaatctatagaagaaagatggaaggaacctccataaacttctgcatggaactctgagcaagatgtaaataaaattaaaaggtggatggcaagagtgcaaatactatcttcaatccttcagtcccagccagaagaatctctgaaagcatattgtgaatgtatacaatgtagtacaaacaatctctgtgatgattaacagtatgtcaccacttcattttttaaaaaggatcacgtctaatgcccattttcccaactattctttccaaagtaagatataaggtagcttaataaactaagtaaaacgtatgacttgagtacaaaaggattgttttaatccccattattctggaaagtgcatcctagtctcccagtctataacatcataataccttgagtataagtccaaatattaggttatatctatattaaaaacaaaatttctgtcatctgtcctggccattcaggcaactccagcctgggctcaatcctggagttctgtctggtcactatcagaaggaacactttgagggaaaccctggtgcagccagccctgaggaaacatggcctgagtgccctcactggtgggtgggaataaaatggaagtgcacagaggagatgtcagaagaccaaaacttggtgaatagtcccagtgctaggtcatataggaaacagaaagcatgacagtggccttttgggaacccaagttacgtcctggtgaaagcagaaaggaggagacaggatggctgtcaacaacgtcagcatgggcatggctcccaggcatggaggtaattgggtcttggcttcaatgccacccttttgggaagccctaaaccaagtgaggtgttcttttcccttgcttcccatatttgtcccagttgcagccctgttgttatgtatttactcttcaatttcttatttatacctctcactcaattgttaattctttgggttcagtctcatgccatatttactcctagtacctaatgcagtgcctggcacacagcaagtgcccttgagaacttgtagagggagtaaaaaagtgcatggataaatgactgcagcaaatcacaaattttgaactttgacccttttcttttagtcccaaatagtggcattccatagctgagggtagtaggagcagttcaccctgggagcagacaataagaggaagaatgaagccaactaaaattctgaatgctttttgttggatttcgtagggtattttttttaaaatagggtcttgctatgttgcccaggctggtcttaactgactgctttttattattaccatgcactggcaattccaaacaatgtcagtgttaaaatgcttctccctgaaaaagagaaaaaaaaaaggaaaaaaagaaaagaaaagtgaaaagaaaaactcttattggcctaagttctaaataatagctaggttaccactgagttttaactatatgtatatgagcttcaaataagcacctttttattatgtaaataaataaaagttatctgtatccccaaaaa

SEQ ID NO: 448 - protein, 296 aa, Homo Sapiens
MALTSDLGKQIKLKEVEGTLLQPATVDNWSQIQSFEAKPDDLLICTYPKAGTTWIQEIVDMIEQNGDVEKCQRAIIQHRHPFIEWARPPQPSGVEKAKAMPSPRILKTHLSTQLLPPSFWENNCKFLYVARNAKDCMVSYYHFQRMNHMLPDPGTWEEYFETFINGKVVWGSWFDHVKGWWEMKDRHQILFLFYEDIKRDPKHEIRKVMQFMGKKVDETVLDKIVQETSFEKMKENPMTNRSTVSKSILDQSISSFMRKGTVGDWKNHFTVAQNERFDEIYRRKMEGTSINFCMEL

SEQ ID NO: 449 - DNA, 2387 bp, Homo Sapiens
agacacctctgccctcaccatgagcctctggcagcccctggtcctggtgctcctggtgctgggctgctgctttgctgcccccagacagcgccagtccacccttgtgctcttccctggagacctgagaaccaatctcaccgacaggcagctggcagaggaatacctgtaccgctatggttacactcgggtggcagagatgcgtggagagtcgaaatctctggggcctgcgctgctgcttctccagaagcaactgtccctgcccgagaccggtgagctggatagcgccacgctgaaggccatgcgaaccccacggtgcggggtcccagacctgggcagattccaaacctttgagggcgacctcaagtggcaccaccacaacatcacctattggatccaaaactactcggaagacttgccgcgggcggtgattgacgacgcctttgcccgcgccttcgcactgtggagcgcggtgacgccgctcaccttcactcgcgtgtacagccgggacgcagacatcgtcatccagtttggtgtcgcggagcacggagacgggtatcccttcgacgggaaggacgggctcctggcacacgcctttcctcctggccccggcattcagggagacgcccatttcgacgatgacgagttgtggtccctgggcaagggcgtcgtggttccaactcggtttggaaacgcagatggcgcggcctgccacttccccttcatcttcgagggccgctcctactctgcctgcaccaccgacggtcgctccgacggcttgccctggtgcagtaccacggccaactacgacaccgacgaccggtttggcttctgccccagcgagagactctacacccaggacggcaatgctgatgggaaaccctgccagtttccattcatcttccaaggccaatcctactccgcctgcaccacggacggtcgctccgacggctaccgctggtgcgccaccaccgccaactacgaccgggacaagctcttcggcttctgcccgacccgagctgactcgacggtgatggggggcaactcggcgggggagctgtgcgtcttccccttcactttcctgggtaaggagtactcgacctgtaccagcgagggccgcggagatgggcgcctctggtgcgctaccacctcgaactttgacagcgacaagaagtggggcttctgcccggaccaaggatacagtttgttcctcgtggcggcgcatgagttcggccacgcgctgggcttagatcattcctcagtgccggaggcgctcatgtaccctatgtaccgcttcactgaggggccccccttgcataaggacgacgtgaatggcatccggcacctctatggtcctcgccctgaacctgagccacggcctccaaccaccaccacaccgcagcccacggctcccccgacggtctgccccaccggaccccccactgtccacccctcagagcgccccacagctggccccacaggtcccccctcagctggccccacaggtccccccactgctggcccttctacggccactactgtgcctttgagtccggtggacgatgcctgcaacgtgaacatcttcgacgccatcgcggagattgggaaccagctgtatttgttcaaggatgggaagtactggcgattctctgagggcagggggagccggccgcagggccccttccttatcgccgacaagtggcccgcgctgccccgcaagctggactcggtctttgaggagcggctctccaagaagcttttcttcttctctgggcgccaggtgtgggtgtacacaggcgcgtcggtgctgggcccgaggcgtctggacaagctgggcctgggagccgacgtggcccaggtgaccggggccctccggagtggcagggggaagatgctgctgttcagcgggcggcgcctctggaggttcgacgtgaaggcgcagatggtggatccccggagcgccagcgaggtggaccggatgttccccggggtgcctttggacacgcacgacgtcttccagtaccgagagaaagcctatttctgccaggaccgcttctactggcgcgtgagttcccggagtgagttgaaccaggtggaccaagtgggctacgtgacctatgacatcctgcagtgccctgaggactagggctcccgtcctgctttggcagtgccatgtaaatccccactgggaccaaccctggggaaggagccagtttgccggatacaaactggtattctgttctggaggaaagggaggagtggaggtgggctgggccctctcttctcacctttgttttttgttggagtgtttctaataaacttggattctctaacctttaaaaaaaaaaaaaaaaaaaaaaaaaaaaaaaaaaaaaaaaaaaaaaaaaaaa

SEQ ID NO: 450 - protein, 707 aa, Homo Sapiens
MSLWQPLVLVLLVLGCCFAAPRQRQSTLVLFPGDLRTNLTDRQLAEEYLYRYGYTRVAEMRGESKSLGPALLLLQKQLSLPETGELDSATLKAMRTPRCGVPDLGRFQTFEGDLKWHHHNITYWIQNYSEDLPRAVIDDAFARAFALWSAVTPLTFTRVYSRDADIVIQFGVAEHGDGYPFDGKDGLLAHAFPPGPGIQGDAHFDDDELWSLGKGVVVPTRFGNADGAACHFPFIFEGRSYSACTTDGRSDGLPWCSTTANYDTDDRFGFCPSERLYTQDGNADGKPCQFPFIFQGQSYSACTTDGRSDGYRWCATTANYDRDKLFGFCPTRADSTVMGGNSAGELCVFPFTFLGKEYSTCTSEGRGDGRLWCATTSNFDSDKKWGFCPDQGYSLFLVAAHEFGHALGLDHSSVPEALMYPMYRFTEGPPLHKDDVNGIRHLYGPRPEPEPRPPTTTTPQPTAPPTVCPTGPPTVHPSERPTAGPTGPPSAGPTGPPTAGPSTATTVPLSPVDDACNVNIFDAIAEIGNQLYLFKDGKYWRFSEGRGSRPQGPFLIADKWPALPRKLDSVFEERLSKKLFFFSGRQVWVYTGASVLGPRRLDKLGLGADVAQVTGALRSGRGKMLLFSGRRLWRFDVKAQMVDPRSASEVDRMFPGVPLDTHDVFQYREKAYFCQDRFYWRVSSRSELNQVDQVGYVTYDILQCPED

SEQ ID NO: 451 - DNA, 1865 bp, Homo Sapiens
aaaattagaactaggctgacattacatttcacttggttacagctgactggggattttaatcatttggagccacactgaaaaaaaaatttccccctgcaatctactcttaactgatagtcgctaactttggttatgtgtgtctattcagaatattacattaattgatttctcaaacaaaggtcctttctgaaatggtatctatgattcagctattcaaaacctaatgaagttggtgactatgacaatgtggagaaatcatgacagaaaatgtggtttgtactggggctgtcaatgctgtaaaggaagtttgggaaaaaagaataaagaaactcaatgaagacctgaagcgagagaaggaatttcaacacaagctagtgcggatctgggaagaacgagtaagcttaaccaagctaagagaaaaggtcaccagggaagatggaagagtcattttgaagatagaaaaagaggaatggaagaccctcccttcttctctgctgaaactgaatcaactacaggaatggcaacttcatagaactggtttgctgaaaattcctgaattcattggaagattccagaacctcattgtgttagatttatctcgaaacacaatttcagagataccaccagggattggactgcttactagacttcaggaactgattctcagctacaacaaaatcaagactgtccccaaggaactaagtaattgtgccagcttggagaaactagaactggctgttaacagagatatatgtgatcttccacaagagctcagcaatctgctaaaacttactcaccttgatctgagtatgaacgattttactacaatccctcttgctgtgttgaacatgcctgcccttgagtggctggacatgggaagcaacaaacttgaacaacttcctgatactatagaaagaatgcaaaatctacatacgttatggctgcaacgaaatgaaataacatgcttgcctcaaacaatcagcaatatgaaaaatctgggtactcttgttctcagcaacaataaactgcaagatattccagtatgcatggaagaaatggcaaatctgaggtttgtcaacttcagagacaacccactgaaattgaaagtatcacttcctcccagtgaaggcacagatgaagaagaggaacgggaattatttggccttcagtttatgcacacatacatacaagagtcacggagaagagcagatcaccaagtcaacggttcaactactttaccaatctccataaatacggatggataatataattcaagatgcccttctaaagaggattactttggtgaattctctaatgtttggatttctgaagtaaaaagaaaagctattaccaaagtttaatgaggccacagcattttttaaagttcatattatttgctatttaaagtatatatttttttgatataaaaatataattaaaaaattttttttggtggaagacagatgatgctcaaatttcttttccattaagcagttgtttctggtgatgaagaatgatttggtaaagcagttaacaaaacattttccaaagacaccagagggtctgtatagtactgcaaagcaggactgaatcccttctgctgcaaatactggattcgaccttggtcaatcagcaatttacaaagatgccctattttcttcttttcttcaacactaagaagcctaaattgaataaacacacacaaaacattgttaaaattttgcaaaagtttataaaaaattatttttgtcactatttattgagagactgttaactaacccataatgtactaagtactttgtcccatgcttccaagacacattatatttatgaccacaataaaagatgtgtatattttaaaaaaa

SEQ ID NO: 452 - protein, 335 aa, Homo Sapiens
MTENVVCTGAVNAVKEVWEKRIKKLNEDLKREKEFQHKLVRIWEERVSLTKLREKVTREDGRVILKIEKEEWKTLPSSLLKLNQLQEWQLHRTGLLKIPEFIGRFQNLIVLDLSRNTISEIPPGIGLLTRLQELILSYNKIKTVPKELSNCASLEKLELAVNRDICDLPQELSNLLKLTHLDLSMNDFTTIPLAVLNMPALEWLDMGSNKLEQLPDTIERMQNLHTLWLQRNEITCLPQTISNMKNLGTLVLSNNKLQDIPVCMEEMANLRFVNFRDNPLKLKVSLPPSEGTDEEEERELFGLQFMHTYIQESRRRADHQVNGSTTLPISINTDG

SEQ ID NO: 453 - DNA, 626 bp, Homo Sapiens
acatttgcttctgacacaactgtgttcactagcaacctcaaacagacaccatggtgcatctgactcctgaggagaagtctgccgttactgccctgtggggcaaggtgaacgtggatgaagttggtggtgaggccctgggcaggctgctggtggtctacccttggacccagaggttctttgagtcctttggggatctgtccactcctgatgctgttatgggcaaccctaaggtgaaggctcatggcaagaaagtgctcggtgcctttagtgatggcctggctcacctggacaacctcaagggcacctttgccacactgagtgagctgcactgtgacaagctgcacgtggatcctgagaacttcaggctcctgggcaacgtgctggtctgtgtgctggcccatcactttggcaaagaattcaccccaccagtgcaggctgcctatcagaaagtggtggctggtgtggctaatgccctggcccacaagtatcactaagctcgctttcttgctgtccaatttctattaaaggttcctttgttccctaagtccaactactaaactgggggatattatgaagggccttgagcatctggattctgcctaataaaaaacatttattttcattgc

SEQ ID NO: 454 - protein, 147 aa, Homo Sapiens
MVHLTPEEKSAVTALWGKVNVDEVGGEALGRLLVVYPWTQRFFESFGDLSTPDAVMGNPKVKAHGKKVLGAFSDGLAHLDNLKGTFATLSELHCDKLHVDPENFRLLGNVLVCVLAHHFGKEFTPPVQAAYQKVVAGVANALAHKYH

SEQ ID NO: 455 - DNA, 1825 bp, Homo Sapiens
acacatgctgcatacacacagaaacactgcaaatccactgcctccttccctcctccctacccttccttctctcagcatttctatccccgcctcctcctcttacccaaattttccagccgatcactggagctgacttccgcaatcccgatggaataaatctagcacccctgatggtgtgcccacactttgctgccgaaacgaagccagacaacagatttccatcagcaggatgtgggggctcaaggttctgctgctacctgtggtgagctttgctctgtaccctgaggagatactggacacccactgggagctatggaagaagacccacaggaagcaatataacaacaaggtggatgaaatctctcggcgtttaatttgggaaaaaaacctgaagtatatttccatccataaccttgaggcttctcttggtgtccatacatatgaactggctatgaaccacctgggggacatgaccagtgaagaggtggttcagaagatgactggactcaaagtacccctgtctcattcccgcagtaatgacaccctttatatcccagaatgggaaggtagagccccagactctgtcgactatcgaaagaaaggatatgttactcctgtcaaaaatcagggtcagtgtggttcctgttgggcttttagctctgtgggtgccctggagggccaactcaagaagaaaactggcaaactcttaaatctgagtccccagaacctagtggattgtgtgtctgagaatgatggctgtggagggggctacatgaccaatgccttccaatatgtgcagaagaaccggggtattgactctgaagatgcctacccatatgtgggacaggaagagagttgtatgtacaacccaacaggcaaggcagctaaatgcagagggtacagagagatccccgaggggaatgagaaagccctgaagagggcagtggcccgagtgggacctgtctctgtggccattgatgcaagcctgacctccttccagttttacagcaaaggtgtgtattatgatgaaagctgcaatagcgataatctgaaccatgcggttttggcagtgggatatggaatccagaagggaaacaagcactggataattaaaaacagctggggagaaaactggggaaacaaaggatatatcctcatggctcgaaataagaacaacgcctgtggcattgccaacctggccagcttccccaagatgtgactccagccagccaaatccatcctgctcttccatttcttccacgatggtgcagtgtaacgatgcactttggaagggagttggtgtgctatttttgaagcagatgtggtgatactgagattgtctgttcagtttccccatttgtttgtgcttcaaatgatccttcctactttgcttctctccacccatgacctttttcactgtggccatcaggactttccctgacagctgtgtactcttaggctaagagatgtgactacagcctgcccctgactgtgttgtcccagggctgatgctgtacaggtacaggctggagattttcacataggttagattctcattcacgggactagttagctttaagcaccctagaggactagggtaatctgacttctcacttcctaagttcccttctatatcctcaaggtagaaatgtctatgttttctactccaattcataaatctattcataagtctttggtacaagtttacatgataaaaagaaatgtgatttgtcttcccttctttgcacttttgaaataaagtatttatctcctgtctacagtttaataaatagcatctagtacacattcaaaaaaaaaaaaaaaa

SEQ ID NO: 456 - protein, 329 aa, Homo Sapiens
MWGLKVLLLPVVSFALYPEEILDTHWELWKKTHRKQYNNKVDEISRRLIWEKNLKYISIHNLEASLGVHTYELAMNHLGDMTSEEVVQKMTGLKVPLSHSRSNDTLYIPEWEGRAPDSVDYRKKGYVTPVKNQGQCGSCWAFSSVGALEGQLKKKTGKLLNLSPQNLVDCVSENDGCGGGYMTNAFQYVQKNRGIDSEDAYPYVGQEESCMYNPTGKAAKCRGYREIPEGNEKALKRAVARVGPVSVAIDASLTSFQFYSKGVYYDESCNSDNLNHAVLAVGYGIQKGNKHWIIKNSWGENWGNKGYILMARNKNNACGIANLASFPKM

SEQ ID NO: 457 - DNA, 1097 bp, Homo Sapiens
gccgtcggagcccttgcacgcctgctctcttgtagcttctctcagcctagcccagcatcactatggtggacgctttcctgggcacctggaagctagtggacagcaagaatttcgatgactacatgaagtcactcggtgtgggttttgctaccaggcaggtggccagcatgaccaagcctaccacaatcatcgaaaagaatggggacattctcaccctaaaaacacacagcaccttcaagaacacagagatcagctttaagttgggggtggagttcgatgagacaacagcagatgacaggaaggtcaagtccattgtgacactggatggagggaaacttgttcacctgcagaaatgggacgggcaagagaccacacttgtgcgggagctaattgatggaaaactcatcctgacactcacccacggcactgcagtttgcactcgcacttatgagaaagaggcatgacctgactgcactgttgctgactactactctgccaatcggctacccctcgactcagcaccacattgcctcatttcttcctctgcattttgtacaaatccacgaattcttctggggtcaggtgccactgaccgggatccagttccagttcccatggtgtatgtggttttttttttttttttttaactgcactcatagggtgctctgaggtcaataaagcagagccaaggccacccagttgcctttttgcctttggtaacataactctgggagtcttggtttatcctgtgtgtcagagagtgggcagaaataacggcctgaaggttactgaggaagaagcactggatgggagactgaaatggacagtctcggagcctgttaatcagctgatcaccttacacatttaataataaaagagctgtacctacacgttgcctttacactgccccccctccatggtcaaatgacctagttcagtcagtgatggggcttccccaggtttggctattgaactgtcacttcaggcccatcctacactgaaagctcttgggtctggctgttctctgtgaaatgctgtagtctctccctttccagaattcaggttcagggcacagaacccaggcttgtaccatggtg

SEQ ID NO: 458 - protein, 133 aa, Homo Sapiens [sequence omitted]

SEQ ID NO: 459 - DNA, 3278 bp, Homo Sapiens
aatagactaaacccagagcctcaaagcagtgcactccgtgaaggcaaagagaacacgctgcaaaaggctttccaagaatcctcgacatggcaaggaggagctcgttccagtcgtgtcagataatatccctgttcacttttgccgttggagtcaatatctgcttaggattcactgcacatcgaattaagagagcagaaggatgggaggaaggtcctcctacagtgctatcagactccccctggaccaacatctccggatcttgcaagggcaggtgctttgaacttcaagaggctggacctcctgattgtcgctgtgacaacttgtgtaagagctataccagttgctgccatgactttgatgagctgtgtttgaagacagcccgtggctgggagtgtactaaggacagatgtggagaagtcagaaatgaagaaaatgcctgtcactgctcagaggactgcttggccaggggagactgctgtaccaattaccaagtggtttgcaaaggagagtcgcattgggttgatgatgactgtgaggaaataaaggccgcagaatgccctgcagggtttgttcgccctccattaatcatcttctccgtggatggcttccgtgcatcatacatgaagaaaggcagcaaagtcatgcctaatattgaaaaactaaggtcttgtggcacacactctccctacatgaggccggtgtacccaactaaaacctttcctaacttatacactttggccactgggctatatccagaatcacatggaattgttggcaattcaatgtatgatcctgtatttgatgccacttttcatctgcgagggcgagagaaatttaatcatagatggtggggaggtcaaccgctatggattacagccaccaagcaaggggtgaaagctggaacattcttttggtctgttgtcatccctcacgagcggagaatattaaccatattgcagtggctcaccctgccagatcatgagaggccttcggtctatgccttctattctgagcaacctgatttctctggacacaaatatggccctttcggccctgaggagagtagttatggctcaccttttactccggctaagagacctaagaggaaagttgcccctaagaggagacaggaaagaccagttgctcctccaaagaaaagaagaagaaaaatacataggatggatcattatgctgcggaaactcgtcaggacaaaatgacaaatcctctgagggaaatcgacaaaattgtggggcaattaatggatggactgaaacaactaaaactgcatcggtgtgtcaacgtcatctttgtcggagaccatggaatggaagatgtcacatgtgatagaactgagttcttgagtaattacctaactaatgtggatgatattactttagtgcctggaactctaggaagaattcgatccaaatttagcaacaatgctaaatatgaccccaaagccattattgccaatctcacgtgtaaaaaaccagatcagcactttaagccttacttgaaacagcaccttcccaaacgtttgcactatgccaacaacagaagaattgaggatatccatttattggtggaacgcagatggcatgttgcaaggaaacctttggatgtttataagaaaccatcaggaaaatgctttttccagggagaccacggatttgataacaaggtcaacagcatgcagactgtttttgtaggttatggctcaacatttaagtacaagactaaagtgcctccatttgaaaacattgaactttacaatgttatgtgtgatctcctgggattgaagccagctcctaataatgggacccatggaagtttgaatcatctcctgcgcactaataccttcaggccaaccatgccagaggaagttaccagacccaattatccagggattatgtaccttcagtctgattttgacctgggctgcacttgtgatgataaggtagagccaaagaacaagttggatgaactcaacaaacggcttcatacaaaagggtctacagaagagagacacctcctctatgggcgacctgcagtgctttatcggactagatatgatatcttatatcacactgactttgaaagtggttatagtgaaatattcctaatgccactctggacatcatatactgtttccaaacaggctgaggtttccagcgttcctgaccatctgaccagttgcgtccggcctgatgtccgtgtttctccgagtttcagtcagaactgtttggcctacaaaaatgataagcagatgtcctacggattcctctttcctccttatctgagctcttcaccagaggctaaatatgatgcattccttgtaaccaatatggttccaatgtatcctgctttcaaacgggtctggaattatttccaaagggtattggtgaagaaatatgcttcggaaagaaatggagttaacgtgataagtggaccaatcttcgactatgactatgatggcttacatgacacagaagacaaaataaaacagtacgtggaaggcagttccattcctgttccaactcactactacagcatcatcaccagctgtctggatttcactcagcctgccgacaagtgtgacggccctctctctgtgtcctccttcatcctgcctcaccggcctgacaacgaggagagctgcaatagctcagaggacgaatcaaaatgggtagaagaactcatgaagatgcacacagctagggtgcgtgacattgaacatctcaccagcctggacttcttccgaaagaccagccgcagctacccagaaatcctgacactcaagacatacctgcatacatatgagagcgagatttaactttctgagcatctgcagtacagtcttatcaactggttgtatatttttatattgtttttgtatttattaatttgaaaccaggacattaaaaatgttagtattttaatcctgtaccaaatctgacatattatgcctgaatgactccactgtttttctctaatgcttgatttaggtagccttgtgttctgagtagagcttgtaataaatactgcagcttgagtttttagtggaagcttctaaatggtgctgcagatttgatatttgcattgaggaaatattaattttccaatgcacagttgccacatttagtcctgtactgtatggaaacactgattttgtaaagttgcctttatttgctgttaactgttaactatgacagatatatttaagccttataaaccaatcttaaacataataaatcacacattcagttttttctggttt

SEQ ID NO: 460 - protein, 915 aa, Homo Sapiens
MARRSSFQSCQIISLFTFAVGVNICLGFTAHRIKRAEGWEEGPPTVLSDSPWTNISGSCKGRCFELQEAGPPDCRCDNLCKSYTSCCHDFDELCLKTARGWECTKDRCGEVRNEENACHCSEDCLARGDCCTNYQVVCKGESHWVDDDCEEIKAAECPAGFVRPPLIIFSVDGFRASYMKKGSKVMPNIEKLRSCGTHSPYMRPVYPTKTFPNLYTLATGLYPESHGIVGNSMYDPVFDATFHLRGREKFNHRWWGGQPLWITATKQGVKAGTFFWSVVIPHERRILTILQWLTLPDHERPSVYAFYSEQPDFSGHKYGPFGPEESSYGSPFTPAKRPKRKVAPKRRQERPVAPPKKRRRKIHRMDHYAAETRQDKMTNPLREIDKIVGQLMDGLKQLKLHRCVNVIFVGDHGMEDVTCDRTEFLSNYLTNVDDITLVPGTLGRIRSKFSNNAKYDPKAIIANLTCKKPDQHFKPYLKQHLPKRLHYANNRRIEDIHLLVERRWHVARKPLDVYKKPSGKCFFQGDHGFDNKVNSMQTVFVGYGSTFKYKTKVPPFENIELYNVMCDLLGLKPAPNNGTHGSLNHLLRTNTFRPTMPEEVTRPNYPGIMYLQSDFDLGCTCDDKVEPKNKLDELNKRLHTKGSTEERHLLYGRPAVLYRTRYDILYHTDFESGYSEIFLMPLWTSYTVSKQAEVSSVPDHLTSCVRPDVRVSPSFSQNCLAYKNDKQMSYGFLFPPYLSSSPEAKYDAFLVTNMVPMYPAFKRVWNYFQRVLVKKYASERNGVNVISGPIFDYDYDGLHDTEDKIKQYVEGSSIPVPTHYYSIITSCLDFTQPADKCDGPLSVSSFILPHRPDNEESCNSSEDESKWVEELMKMHTARVRDIEHLTSLDFFRKTSRSYPEILTLKTYLHTYESEI

SEQ ID NO: 461 - DNA, 1524 bp, Homo Sapiens
agcagacagaggactctcattaaggaaggtgtcctgtgccctgaccctacaagatgccaagagaagatgctcacttcatctatggttaccccaagaaggggcacggccactcttacaccacggctgaagaggccgctgggatcggcatcctgacagtgatcctgggagtcttactgctcatcggctgttggtattgtagaagacgaaatggatacagagccttgatggataaaagtcttcatgttggcactcaatgtgccttaacaagaagatgcccacaagaagggtttgatcatcgggacagcaaagtgtctcttcaagagaaaaactgtgaacctgtggttcccaatgctccacctgcttatgagaaactctctgcagaacagtcaccaccaccttattcaccttaagagccagcgagacacctgagacatgctgaaattatttctctcacacttttgcttgaatttaatacagacatctaatgttctcctttggaatggtgtaggaaaaatgcaagccatctctaataataagtcagtgttaaaattttagtaggtccgctagcagtactaatcatgtgaggaaatgatgagaaatattaaattgggaaaactccatcaataaatgttgcaatgcatgatactatctgtgccagaggtaatgttagtaaatccatggtgttattttctgagagacagaattcaagtgggtattctggggccatccaatttctctttacttgaaatttggctaataacaaactagtcaggttttcgaaccttgaccgacatgaactgtacacagaattgttccagtactatggagtgctcacaaaggatacttttacaggttaagacaaagggttgactggcctatttatctgatcaagaacatgtcagcaatgtctctttgtgctctaaaattctattatactacaataatatattgtaaagatcctatagctctttttttttgagatggagtttcgcttttgttgcccaggctggagtgcaatggcgcgatcttggctcaccataacctccgcctcccaggttcaagcaattctcctgccttagcctcctgagtagctgggattacaggcgtgcgccactatgcctgactaattttgtagttttagtagagacggggtttctccatgttggtcaggctggtctcaaactcctgacctcaggtgatctgcccgcctcagcctcccaaagtgctggaattacaggcgtgagccaccacgcctggctggatcctatatcttaggtaagacatataacgcagtctaattacatttcacttcaaggctcaatgctattctaactaatgacaagtattttctactaaaccagaaattggtagaaggatttaaataagtaaaagctactatgtactgccttagtgctgatgcctgtgtactgccttaaatgtacctatggcaatttagctctcttgggttcccaaatccctctcacaagaatgtgcagaagaaatcataaaggatcagagattctg

SEQ ID NO: 462 - protein, 118 aa, Homo Sapiens
MPREDAHFIYGYPKKGHGHSYTTAEEAAGIGILTVILGVLLLIGCWYCRRRNGYRALMDKSLHVGTQCALTRRCPQEGFDHRDSKVSLQEKNCEPVVPNAPPAYEKLSAEQSPPPYSP

SEQ ID NO: 463 - DNA, 3349 bp, Homo Sapiens
agttggtgtcatgcaagaatctattcacactgactaaagatattggaagagtgaagatcagagaattttaagtctgaaatttggcatcactgccctgaacaatataaccttagttggcataaactactcatacagacaaaggcattatccatcacaataagtaactttttgtctttatttcaaccggacaatcgtgattagaaaagctcctgtgacaaaattcaagaaaacctgacataaatgaacaacaatacaacatgtattcaaccatctatgatctcttccatggctttaccaatcatttacatcctcctttgtattgttggtgtttttggaaacactctctctcaatggatatttttaacaaaaataggtaaaaaaacatcaacgcacatctacctgtcacaccttgtgactgcaaacttacttgtgtgcagtgccatgcctttcatgagtatctatttcctgaaaggtttccaatgggaatatcaatctgctcaatgcagagtggtcaattttctgggaactctatccatgcatgcaagtatgtttgtcagtctcttaattttaagttggattgccataagccgctatgctaccttaatgcaaaaggattcctcgcaagagactacttcatgctatgagaaaatattttatggccatttactgaaaaaatttcgccagcccaactttgctagaaaactatgcatttacatatggggagttgtactgggcataatcattccagttaccgtatactactcagtcatagaggctacagaaggagaagagagcctatgctacaatcggcagatggaactaggagccatgatctctcagattgcaggtctcattggaaccacatttattggattttcctttttagtagtactaacatcatactactcttttgtaagccatctgagaaaaataagaacctgtacgtccattatggagaaagatttgacttacagttctgtgaaaagacatcttttggtcatccagattctactaatagtttgcttccttccttatagtatttttaaacccattttttatgttctacaccaaagagataactgtcagcaattgaattatttaatagaaacaaaaaacattctcacctgtcttgcttcggccagaagtagcacagaccccattatatttcttttattagataaaacattcaagaagacactatataatctctttacaaagtctaattcagcacatatgcaatcatatggttgacttttgaatggaaaaccccacaatattaagaaaagcattcatgtgactttattagggacactaaactacatcattaacatgtcacagcttggttgacaataatcaccaagaaaatctctttggtttttaaaaataaataaacatatattcataaaactcaaaaaacagttatactgaacgttgagatggcagaaactttcagaagcaaaaattaagcatattgaaaggatcccactcatatgaaactaacaggctgttttctgtttaaactcaactgtcagtgcttctgttcagaacacgttatttcatgactaggataaagaagcaaatggtttatgacttgtctgctttctggtagttagaatacaagggtcaatctatggctagtgtttattggtaattttaaaatctttaaaaataagtagctgggcacagtggcttacgcctgtaatcccagcactttgggaggctgaggtgggtggatcattttgaggtcaggagttcaagaccagcctgggcaacatggtgaaaccctgtctctactaaaaatacaaaaatcagctggacatggtggtgggcgcctgtaatcccagctactcgggaggctgaggcaggagaatcgcttgagcccgggacggaggttgcagtgagcggagatcgtgccactgcactacagcctgggaggcagagcgagactctgtctcataaaacaaaacaaaaaaataaaaataagtaaaaaaataaataagaaatatcctcattcacatcttacctaaatgcatgaataatacagtgaaaaaaatccaaggttttataaacatattatttatttgaaattatctggctcatgttattggggagaagcaatattcattgactatatttttaaagcagatgatacttataaaaatgcttaaatatttggattaggctttgtcaaagtaaaaagctatgtcattatatgcccatcttcatcacattgtgcatattttcttctgtattcaatataaataatgttattagtgacaaacagtacctggcagttaattttttgtgaaataaatgaatgaataataagggagtgtaatagtattgcagttaagagattgatctctgaagttatacttcttgggttcaatctggctctactttttatttagctggacaatcttaggcaaattaacttatcctctgtacgtgttaatttcttcatttgtagagcagaaaatactatcttatttacagatcctattattaaatcagctgttactattatgagtagctaacgcttagtaagcacttgctgtttgccaagcattctacttatatgctttacatatattattttaatcaccacaactctaaagtatactaatttactgatgaaaatattgaagtgggctgggtgcggtggctcatgcctgtaatcccagcactctgggaggccgaggtgggcagatcacctgaggtcaggagttcgagactagcctggccaacatggcgaaacccacctctactaaaaatacaaaaattagctgggcgtggtggtgtgtgcctgtagtcccagctacttgggaggctgaggcagaagaatcacttgaactcgggaggctgaggcaggagaatcacttgaactcaggaggcggaggttgcagtgagccaagatcatgccattgcactccagcctgggcgacagagtgagactctgtctcaaaaaaaaaaaaaaaaaaaaaaaaaaaaaaaaatatatatatatatatatatatatatgtatgtatgtatgtatatgtgcatagttaagtaaatcaccccaattttttctaatatttaagtgaacatttaaagataagcatttcttaatgttaatttcttttctttcatgtaatcttgtcagtagacaaatgatggtgactatattctgtaataagtacatatattatgattaaaaaaaaaagcgtgtactatctgcccaaagagatcataagcactttggagctataaacttcttgtctatttctacttccatggtactgatattctcttctcagataaccaaacaaaaacagctgaataaaatcaaccattaatagtaacttgc

SEQ ID NO: 464 - protein, 336 aa, Homo Sapiens
MNNNTTCIQPSMISSMALPIIYILLCIVGVFGNTLSQWIFLTKIGKKTSTHIYLSHLVTANLLVCSAMPFMSIYFLKGFQWEYQSAQCRVVNFLGTLSMHASMFVSLLILSWIAISRYATLMQKDSSQETTSCYEKIFYGHLLKKFRQPNFARKLCIYIWGVVLGIIIPVTVYYSVIEATEGEESLCYNRQMELGAMISQIAGLIGTTFIGFSFLVVLTSYYSFVSHLRKIRTCTSIMEKDLTYSSVKRHLLVIQILLIVCFLPYSIFKPIFYVLHQRDNCQQLNYLIETKNILTCLASARSSTDPIIFLLLDKTFKKTLYNLFTKSNSAHMQSYG

SEQ ID NO: 465 - DNA, 7442 bp, Homo Sapiens
ccggagcggccggggccacgatggagcgcgacggctgcgcggggggcgggagccgcggcggcgagggcgggcgcgctccccgggagggcccggcggggaacggccgcgatcggggccgcagccacgctgccgaggcgcccggggacccgcaggcggccgcgtccttgctggcccctatggacgtgggggaggagccgctggagaaggcggcgcgcgcccgcactgccaaggaccccaacacctataaagtactctcgctggtattgtcagtatgtgtgttaacaacaatacttggttgtatatttgggttgaaaccaagctgtgccaaagaagttaaaagttgcaaaggtcgctgtttcgagagaacatttgggaactgtcgctgtgatgctgcctgtgttgagcttggaaactgctgtttagattaccaggagacgtgcatagaaccagaacatatatggacttgcaacaaattcaggtgtggtgagaaaaggttgaccagaagcctctgtgcctgttcagatgactgcaaggacaagggcgactgctgcatcaactacagttctgtgtgtcaaggtgagaaaagttgggtagaagaaccatgtgagagcattaatgagccacagtgcccagcagggtttgaaacgcctcctaccctcttattttctttggatggattcagggcagaatatttacacacttggggtggacttcttcctgttattagcaaactaaaaaaatgtggaacatatactaaaaacatgagaccggtatatccaacaaaaactttccccaatcactacagcattgtcaccggattgtatccagaatctcatggcataatcgacaataaaatgtatgatcccaaaatgaatgcttccttttcacttaaaagtaaagagaaatttaatcctgagtggtacaaaggagaaccaatttgggtcacagctaagtatcaaggcctcaagtctggcacatttttctggccaggatcagatgtggaaattaacggaattttcccagacatctataaaatgtataatggttcagtaccatttgaagaaaggattttagctgttcttcagtggctacagcttcctaaagatgaaagaccacacttttacactctgtatttagaagaaccagattcttcaggtcattcatatggaccagtcagcagtgaagtcatcaaagccttgcagagggttgatggtatggttggtatgctgatggatggtctgaaagagctgaacttgcacagatgcctgaacctcatccttatttcagatcatggcatggaacaaggcagttgtaagaaatacatatatctgaataaatatttgggggatgttaaaaatattaaagttatctatggacctgcagctcgattgagaccctctgatgtcccagataaatactattcatttaactatgaaggcattgcccgaaatctttcttgccgggaaccaaaccagcacttcaaaccttacctgaaacatttcttacctaagcgtttgcactttgctaagagtgatagaattgagcccttgacattctatttggaccctcagtggcaacttgcattgaatccctcagaaaggaaatattgtggaagtggatttcatggctctgacaatgtattttcaaatatgcaagccctctttgttggctatggacctggattcaagcatggcattgaggctgacacctttgaaaacattgaagtctataacttaatgtgtgatttactgaatttgacaccggctcctaataacggaactcatggaagtcttaaccaccttctaaagaatcctgtttatacgccaaagcatcccaaagaagtgcaccccctggtacagtgccccttcacaagaaaccccagagataaccttggctgctcatgtaacccttcgattttgccgattgaggattttcaaacacagttcaatctgactgtggcagaagagaagattattaagcatgaaactttaccctatggaagacctagagttctccagaaggaaaacaccatctgtcttctttcccagcaccagtttatgagtggatacagccaagacatcttaatgcccctttggacatcctataccgtggacagaaatgacagtttctctacggaagacttctccaactgtctgtaccaggactttagaattcctcttagtcctgtccataaatgttcattttataaaaataacaccaaagtgagttacgggttcctctccccaccacaactaaataaaaattcaagtggaatatattctgaagctttgcttactacaaatatagtgccaatgtaccagagttttcaagttatatggcgctactttcatgacaccctactgcgaaagtatgctgaagaaagaaatggtgtcaatgtcgtcagtggtcctgtgtttgactttgattatgatggacgttgtgattccttagagaatctgaggcaaaaaagaagagtcatccgtaaccaagaaattttgattccaactcacttctttattgtgctaacaagctgtaaagatacatctcagacgcctttgcactgtgaaaacctagacaccttagctttcattttgcctcacaggactgataacagcgagagctgtgtgcatgggaagcatgactcctcatgggttgaagaattgttaatgttacacagagcacggatcacagatgttgagcacatcactggactcagcttctatcaacaaagaaaagagccagtttcagacattttaaagttgaaaacacatttgccaacctttagccaagaagactgatatgttttttatccccaaacaccatgaatctttttgagagaaccttatattttatatagtcctctagctacactattgcattgttcagaaactgtcgaccagagttagaacggagccctcggtgatgcggacatctcagggaaacttgcgtactcagcacagcagtggagagtgttcctgttgaatcttgcacatatttgaatgtgtaagcattgtatacattgatcaagttcgggggaataaagacagaccacacctaaaactgcctttctgcttctcttaaaggagaagtagctgtgaacattgtctggataccagatatttgaatctttcttactattggtaataaaccttgatggcattgggcaaacagtagacttatagtagggttggggtagcccatgttatgtgactatctttatgagaattttaaagtggttctggatatcttttaacttggagtttcatttcttttcattgtaatcaaaaaaaaaattaacagaagccaaaatacttctgagaccttgtttcaatctttgctgtatatcccctcaaaatccaagttattaatcttatgtgttttctttttaattttttgattggatttctttagatttaatggttcaaatgagttcaactttgagggacgatctttgaatatacttacctattataaaatcttactttgtatttgtatttaaaaaagaaaaatattcctatcctgctcactggtaattaacataggtttaaaatggcttcaaatgtggccctatagacggttaaaattgtaccttatcttggcaaaacttcagagcaccagtcagtgcatgcaaggtgccattttttattgagatgcttagaatgtttctttctgtgcacaagacttaccctaccagcagcagagccattctctgttgagtggttcattttgaagttccacagattgaagagaacatgccaccaatcacctcacatcttcttggtggacatgataaatgacacaatgaacttgatttctttactaccttgactgtagctttttatccctacctgtgaaccttcaaagactgcattaacttttaggctacataggtccaattgaggtataatatcagtacaccaaagatttttatatgtccttcgtgtgaccattcttcaacggcctaagggccagctgcaaagacttttggaaaatacaatttacaactcaaaattatttaataatttaggaagttgctttttttttttttttttttcagtcctgcagtttcctgaagctctgtatatgatatttttttcagcctgcttctctctgttgttcagattaggtaattttattcttctgtctcgaagctcactgattctttattctgtctaatctgttctgctgttgagcccatttattcctgatttttatattttagttattgtatgttttatttctaaaatttccattcagtttttctttatatcttctatttgctgagaatttctgtctctttgctgagactttctacgttttcatttgtttcaagtgcatttatacttgcttgttgaagaatttttatgatggctgctgtaaaatccttatcagataattccaacatctgtcacctcattgtttgcatctactgatggtcttttttccattcggaaacattttcctgtttcttggtgtgtggaatgattttttattgaaacctggatatttttaggtattatgttatgagactatgggtcttatttaaaccttctgctttagccaactttctcagataccaccacagcaggggaattgggagcactgcttcattattaccaggtgtggctaggagtccaggttccccagtcagcctccctttatactgagtaacagggtcccctcattactactgggcaaggtgagaattcagtttcccattaggtctttattgattcttccctggctggaatgtgcagcggcaccttttggtgcaccctgggaatctccactaatgctatgggacagagtgaccaggaagagcttcattacaccaggtgggaatgaaattcccagtagcctacacagccttctccgacaccactctggagttgtattcttccagcacacaaacatacacaatttaactcaaagcatcttagcagagcttaattaaatggatagatgcctgttccctttgctggataccaagaatacaaaagtcagggagttggggcacctctttacagcttggtgagagtgtaagtctggactccccactcagcatttgctggtatgggtggggccatggtgtttttccatggtgtttggttggagtacagccttttttacccttgcttggctacccttttctggtcctttggcaggagagagcaggactctcttagggcttttttttcccctgcatttattgacatttccaggttgctgactttttcagctccaagttggaaatatatgagctgaaaagaaaatgtagggaactcatcacagtgttgttacttgggccccaatgttcctagcctattttctgtctactattcagagtcttgctgtgttttaatataatatccaggatttttatatgcatttagcagaaggatgtctactctgcctttgtagaagtgtctcactgatttttacatatttttccagcacacaaacatacacaatttaactcaaagcatcttagcagagcttaattaaatggatagatgtctgttccctttgctggacgccaagaatacaaaaaagaacaagtgacaattttctctgtcttagggagaagagacagcagaagtgtaaatgatccctaaagagtgatagatgttatcatgaagccacaggaggggtgccaggctgcacaaaagagacactggatgcttcttggtagtagaggcagtggcttcccagccttggggctaaggcttgtagggtgaattggaacttttcagatgagcaaggcaaagaagggaccttctaacattccttggatggaacatttttgacattttcccatttacagctacttatattttctacaagtgtcactgtgaccaacttatgtacacatactttttcttgcttagttataataatctgttcttaaagaaaatgtcagtctctacattctatgctgactgttaaggaaagagcacccacatctgctcctacttagctttttttctgtggttcttacacagtattcctttttttcttttcttgaaagagactcctcctttcttttcttttcttgaaagagttttaaacagataagatggcaaaagtgactgatctctactcccccagtttgaatggtaaatttgaatggtaaattcccatgaacatatatggaaatgtctttatcctactttctccaataaaggctgttcttagcttttcaaatgcaaagtgaaacctttatttatcttgatttcttttttttttttttttttttttttttttttgagatgctctgtcacccaggctggagtgcagtggcaagatcttggctcactgcaagctccgcctcccaggttcacgccattctcctggctcagcctcccgagtaactgggactacaggcacctgccgtcacgcctggctaattttttgtatttttagtagagaatggagtttcaccgtgttagccaggatggtctcgatctcctgaccttgtgatctgcccgcctcggcctcccaaagtgctgggattacaggctcgagccactgcctccagcctatcctgatttctactgtcatgcctcacatcagtccttttttttttttttgagacagagtctcgctctgtggcccaggctagactgcagtggcatgatctcggctcactgcaacctccacctccggggttctagcaattctcctgcctcagcctcctgagtagctgggattataggcgcatgccacacctggctttttgtattttagtggagatggggtttcactgtgttgctcaggctggtcttgatctcctgagctcagacaatccccccgccttggcctcccaaagtgctaggattataggcgagagctgctgtgtgcttcttaagtgaggtaagtaacttccatagaaaatttccatcagttcattcatgaaagaacaaagaacctggcaaaacttaaaaaaacgtttccaagaatcagataaaagaggacaaaccttagggagaagaaggcagctgctcatttccagcaggggaagtagctgcatagagtacaaggactggtaggcctgttggctgttcctgtttaaggagacaagatgggcatggaacagggaccaccccctcctctgggagaagctgttacccccttcacttttcctcctctgtcattacccacaatcactctccttctttgcgctatggtaggtgtttacccatcataggaatgggcatttgaactttgaaactgaatgtggtgattacacttcatgctgaagcttttcacatgagtgctttcataagcattaagtaaaattttataatgactgcagtccaaggacattttccctggtttttggccagtctaaatattgtaagagagagagaagaaaagtgtacggaatataattgtctctaagctaagaaatgtggatgttcaaataaaacatacgtacagaa

SEQ ID NO: 466 - protein, 925 aa, Homo Sapiens
MERDGCAGGGSRGGEGGRAPREGPAGNGRDRGRSHAAEAPGDPQAAASLLAPMDVGEEPLEKAARARTAKDPNTYKVLSLVLSVCVLTTILGCIFGLKPSCAKEVKSCKGRCFERTFGNCRCDAACVELGNCCLDYQETCIEPEHIWTCNKFRCGEKRLTRSLCACSDDCKDKGDCCINYSSVCQGEKSWVEEPCESINEPQCPAGFETPPTLLFSLDGFRAEYLHTWGGLLPVISKLKKCGTYTKNMRPVYPTKTFPNHYSIVTGLYPESHGIIDNKMYDPKMNASFSLKSKEKFNPEWYKGEPIWVTAKYQGLKSGTFFWPGSDVEINGIFPDIYKMYNGSVPFEERILAVLQWLQLPKDERPHFYTLYLEEPDSSGHSYGPVSSEVIKALQRVDGMVGMLMDGLKELNLHRCLNLILISDHGMEQGSCKKYIYLNKYLGDVKNIKVIYGPAARLRPSDVPDKYYSFNYEGIARNLSCREPNQHFKPYLKHFLPKRLHFAKSDRIEPLTFYLDPQWQLALNPSERKYCGSGFHGSDNVFSNMQALFVGYGPGFKHGIEADTFENIEVYNLMCDLLNLTPAPNNGTHGSLNHLLKNPVYTPKHPKEVHPLVQCPFTRNPRDNLGCSCNPSILPIEDFQTQFNLTVAEEKIIKHETLPYGRPRVLQKENTICLLSQHQFMSGYSQDILMPLWTSYTVDRNDSFSTEDFSNCLYQDFRIPLSPVHKCSFYKNNTKVSYGFLSPPQLNKNSSGIYSEALLTTNIVPMYQSFQVIWRYFHDTLLRKYAEERNGVNVVSGPVFDFDYDGRCDSLENLRQKRRVIRNQEILIPTHFFIVLTSCKDTSQTPLHCENLDTLAFILPHRTDNSESCVHGKHDSSWVEELLMLHRARITDVEHITGLSFYQQRKEPVSDILKLKTHLPTFSQED

SEQ ID NO: 467 - DNA, 5820 bp, Homo Sapiens
agccgctgcgcccgagctggcctgcgagttcagggctcctgtcgctctccaggagcaacctctactccggacgcacaggcattccccgcgcccctccagccctcgccgccctcgccaccgctcccggccgccgcgctccggtacacacaggatccctgctgggcaccaacagctccaccatggggctggcctggggactaggcgtcctgttcctgatgcatgtgtgtggcaccaaccgcattccagagtctggcggagacaacagcgtgtttgacatctttgaactcaccggggccgcccgcaaggggtctgggcgccgactggtgaagggccccgacccttccagcccagctttccgcatcgaggatgccaacctgatcccccctgtgcctgatgacaagttccaagacctggtggatgctgtgcgggcagaaaagggtttcctccttctggcatccctgaggcagatgaagaagacccggggcacgctgctggccctggagcggaaagaccactctggccaggtcttcagcgtggtgtccaatggcaaggcgggcaccctggacctcagcctgaccgtccaaggaaagcagcacgtggtgtctgtggaagaagctctcctggcaaccggccagtggaagagcatcaccctgtttgtgcaggaagacagggcccagctgtacatcgactgtgaaaagatggagaatgctgagttggacgtccccatccaaagcgtcttcaccagagacctggccagcatcgccagactccgcatcgcaaaggggggcgtcaatgacaatttccagggggtgctgcagaatgtgaggtttgtctttggaaccacaccagaagacatcctcaggaacaaaggctgctccagctctaccagtgtcctcctcacccttgacaacaacgtggtgaatggttccagccctgccatccgcactaactacattggccacaagacaaaggacttgcaagccatctgcggcatctcctgtgatgagctgtccagcatggtcctggaactcaggggcctgcgcaccattgtgaccacgctgcaggacagcatccgcaaagtgactgaagagaacaaagagttggccaatgagctgaggcggcctcccctatgctatcacaacggagttcagtacagaaataacgaggaatggactgttgatagctgcactgagtgtcactgtcagaactcagttaccatctgcaaaaaggtgtcctgccccatcatgccctgctccaatgccacagttcctgatggagaatgctgtcctcgctgttggcccagcgactctgcggacgatggctggtctccatggtccgagtggacctcctgttctacgagctgtggcaatggaattcagcagcgcggccgctcctgcgatagcctcaacaaccgatgtgagggctcctcggtccagacacggacctgccacattcaggagtgtgacaagagatttaaacaggatggtggctggagccactggtccccgtggtcatcttgttctgtgacatgtggtgatggtgtgatcacaaggatccggctctgcaactctcccagcccccagatgaacgggaaaccctgtgaaggcgaagcgcgggagaccaaagcctgcaagaaagacgcctgccccatcaatggaggctggggtccttggtcaccatgggacatctgttctgtcacctgtggaggaggggtacagaaacgtagtcgtctctgcaacaaccccacaccccagtttggaggcaaggactgcgttggtgatgtaacagaaaaccagatctgcaacaagcaggactgtccaattgatggatgcctgtccaatccctgctttgccggcgtgaagtgtactagctaccctgatggcagctggaaatgtggtgcttgtccccctggttacagtggaaatggcatccagtgcacagatgttgatgagtgcaaagaagtgcctgatgcctgcttcaaccacaatggagagcaccggtgtgagaacacggaccccggctacaactgcctgccctgccccccacgcttcaccggctcacagcccttcggccagggtgtcgaacatgccacggccaacaaacaggtgtgcaagccccgtaacccctgcacggatgggacccacgactgcaacaagaacgccaagtgcaactacctgggccactatagcgaccccatgtaccgctgcgagtgcaagcctggctacgctggcaatggcatcatctgcggggaggacacagacctggatggctggcccaatgagaacctggtgtgcgtggccaatgcgacttaccactgcaaaaaggataattgccccaaccttcccaactcagggcaggaagactatgacaaggatggaattggtgatgcctgtgatgatgacgatgacaatgataaaattccagatgacagggacaactgtccattccattacaacccagctcagtatgactatgacagagatgatgtgggagaccgctgtgacaactgtccctacaaccacaacccagatcaggcagacacagacaacaatggggaaggagacgcctgtgctgcagacattgatggagacggtatcctcaatgaacgggacaactgccagtacgtctacaatgtggaccagagagacactgatatggatggggttggagatcagtgtgacaattgccccttggaacacaatccggatcagctggactctgactcagaccgcattggagatacctgtgacaacaatcaggatattgatgaagatggccaccagaacaatctggacaactgtccctatgtgcccaatgccaaccaggctgaccatgacaaagatggcaagggagatgcctgtgaccacgatgatgacaacgatggcattcctgatgacaaggacaactgcagactcgtgcccaatcccgaccagaaggactctgacggcgatggtcgaggtgatgcctgcaaagatgattttgaccatgacagtgtgccagacatcgatgacatctgtcctgagaatgttgacatcagtgagaccgatttccgccgattccagatgattcctctggaccccaaagggacatcccaaaatgaccctaactgggttgtacgccatcagggtaaagaactcgtccagactgtcaactgtgatcctggactcgctgtaggttatgatgagtttaatgctgtggacttcagtggcaccttcttcatcaacaccgaaagggacgatgactatgctggatttgtctttggctaccagtccagcagccgcttttatgttgtgatgtggaagcaagtcacccagtcctactgggacaccaaccccacgagggctcagggatactcgggcctttctgtgaaagttgtaaactccaccacagggcctggcgagcacctgcggaacgccctgtggcacacaggaaacacccctggccaggtgcgcaccctgtggcatgaccctcgtcacataggctggaaagatttcaccgcctacagatggcgtctcagccacaggccaaagacgggtttcattagagtggtgatgtatgaagggaagaaaatcatggctgactcaggacccatctatgataaaacctatgctggtggtagactagggttgtttgtcttctctcaagaaatggtgttcttctctgacctgaaatacgaatgtagagatccctaatcatcaaattgttgattgaaagactgatcataaaccaatgctggtattgcaccttctggaactatgggcttgagaaaacccccaggatcacttctccttggcttccttcttttctgtgcttgcatcagtgtggactcctagaacgtgcgacctgcctcaagaaaatgcagttttcaaaaacagactcagcattcagcctccaatgaataagacatcttccaagcatataaacaattgctttggtttccttttgaaaaagcatctacttgcttcagttgggaaggtgcccattccactctgcctttgtcacagagcagggtgctattgtgaggccatctctgagcagtggactcaaaagcattttcaggcatgtcagagaagggaggactcactagaattagcaaacaaaaccaccctgacatcctccttcaggaacacggggagcagaggccaaagcactaaggggagggcgcatacccgagacgattgtatgaagaaaatatggaggaactgttacatgttcggtactaagtcattttcaggggattgaaagactattgctggatttcatgatgctgactggcgttagctgattaacccatgtaaataggcacttaaatagaagcaggaaagggagacaaagactggcttctggacttcctccctgatccccacccttactcatcacctgcagtggccagaattagggaatcagaatcaaaccagtgtaaggcagtgctggctgccattgcctggtcacattgaaattggtggcttcattctagatgtagcttgtgcagatgtagcaggaaaataggaaaacctaccatctcagtgagcaccagctgcctcccaaaggaggggcagccgtgcttatatttttatggttacaatggcacaaaattattatcaacctaactaaaacattccttttctcttttttcctgaattatcatggagttttctaattctctcttttggaatgtagattttttttaaatgctttacgatgtaaaatatttattttttacttattctggaagatctggctgaaggattattcatggaacaggaagaagcgtaaagactatccatgtcatctttgttgagagtcttcgtgactgtaagattgtaaatacagattatttattaactctgttctgcctggaaatttaggcttcatacggaaagtgtttgagagcaagtagttgacatttatcagcaaatctcttgcaagaacagcacaaggaaaatcagtctaataagctgctctgccccttgtgctcagagtggatgttatgggattctttttttctctgttttatcttttcaagtggaattagttggttatccatttgcaaatgttttaaattgcaaagaaagccatgaggtcttcaatactgttttaccccatcccttgtgcatatttccagggagaaggaaagcatatacacttttttctttcatttttccaaaagagaaaaaaatgacaaaaggtgaaacttacatacaaatattacctcatttgttgtgtgactgagtaaagaatttttggatcaagcggaaagagtttaagtgtctaacaaacttaaagctactgtagtacctaaaaagtcagtgttgtacatagcataaaaactctgcagagaagtattcccaataaggaaatagcattgaaatgttaaatacaatttctgaaagttatgttttttttctatcatctggtataccattgctttatttttataaattattttctcattgccattggaatagatatctcagattgtgtagatatgctatttaaataatttatcaggaaatactgcctgtagagttagtatttctatttttatataatgtttgcacactgaattgaagaattgttggttttttcttttttttgttttgtttttttttttttttttttttgcttttgacctcccatttttactatttgccaatacctttttctaggaatgtgcttttttttgtacacatttttatccattttacattctaaagcagtgtaagttgtatattactgtttcttatgtacaaggaacaacaataaatcatatggaaatttatatttataaaaaaaaaaaaaaaaaaaaaaaaaaaaaaa

SEQ ID NO: 468 - protein, 1170 aa, Homo Sapiens
MGLAWGLGVLFLMHVCGTNRIPESGGDNSVFDIFELTGAARKGSGRRLVKGPDPSSPAFRIEDANLIPPVPDDKFQDLVDAVRAEKGFLLLASLRQMKKTRGTLLALERKDHSGQVFSVVSNGKAGTLDLSLTVQGKQHVVSVEEALLATGQWKSITLFVQEDRAQLYIDCEKMENAELDVPIQSVFTRDLASIARLRIAKGGVNDNFQGVLQNVRFVFGTTPEDILRNKGCSSSTSVLLTLDNNVVNGSSPAIRTNYIGHKTKDLQAICGISCDELSSMVLELRGLRTIVTTLQDSIRKVTEENKELANELRRPPLCYHNGVQYRNNEEWTVDSCTECHCQNSVTICKKVSCPIMPCSNATVPDGECCPRCWPSDSADDGWSPWSEWTSCSTSCGNGIQQRGRSCDSLNNRCEGSSVQTRTCHIQECDKRFKQDGGWSHWSPWSSCSVTCGDGVITRIRLCNSPSPQMNGKPCEGEARETKACKKDACPINGGWGPWSPWDICSVTCGGGVQKRSRLCNNPTPQFGGKDCVGDVTENQICNKQDCPIDGCLSNPCFAGVKCTSYPDGSWKCGACPPGYSGNGIQCTDVDECKEVPDACFNHNGEHRCENTDPGYNCLPCPPRFTGSQPFGQGVEHATANKQVCKPRNPCTDGTHDCNKNAKCNYLGHYSDPMYRCECKPGYAGNGIICGEDTDLDGWPNENLVCVANATYHCKKDNCPNLPNSGQEDYDKDGIGDACDDDDDNDKIPDDRDNCPFHYNPAQYDYDRDDVGDRCDNCPYNHNPDQADTDNNGEGDACAADIDGDGILNERDNCQYVYNVDQRDTDMDGVGDQCDNCPLEHNPDQLDSDSDRIGDTCDNNQDIDEDGHQNNLDNCPYVPNANQADHDKDGKGDACDHDDDNDGIPDDKDNCRLVPNPDQKDSDGDGRGDACKDDFDHDSVPDIDDICPENVDISETDFRRFQMIPLDPKGTSQNDPNWVVRHQGKELVQTVNCDPGLAVGYDEFNAVDFSGTFFINTERDDDYAGFVFGYQSSSRFYVVMWKQVTQSYWDTNPTRAQGYSGLSVKVVNSTTGPGEHLRNALWHTGNTPGQVRTLWHDPRHIGWKDFTAYRWRLSHRPKTGFIRVVMYEGKKIMADSGPIYDKTYAGGRLGLFVFSQEMVFFSDLKYECRDP

SEQ ID NO: 469 - DNA, 4711 bp, Homo Sapiens
caggctgcggacccagttgcgagaggcctattatctgctgatccaggccatgcacgacctgccccctgactcgggcgcgcggcggggcggcaggggcttggcggatcacagcttccccgcgggagcccgggctccgggccagccgccttcccgcggcgccgcgtaccgccgagcctgcccccgggacggggagcggggaggcggcggacgccctcggcagcaggtgtccccgccccggtcgcctcagagggagccgcggggaggccagctgcggactcctcggatgcggccgtcctgcagcagaagcctcgagagcctccgggtgggtgccaagccgcctcccttccagcggtggccgagcgacagctggatcaggtgcggcgcgcaccgggactgggacgagcccccgccacgtggaggcaggatggacggctggagtggggaccgcgcccgggcggctgcacccaccggcctccagcctccaggctgcaaggaccacggctgctcctcgggaagccctttcagggatccagcggggtcctctgtgatacgcagtggcaaaggagaccgccaggaaggcccctccttcctcaggccgccggcagtgacagtcaagaagctgcagaagtggatgtacaaagggcgtctgctgtccctgggaatgaagggtcgtgcccgtgggacggctcccaaagtcacaggaacgcaggcagcctccccaaatgtgggcgctttgaaagtgcgtgaaaaccgtgtcctgtcggtgcctccagaccaaagaattacgctgacagatttatttgaaaatgcctatgggtcttcaatgaagggaagagaacttgaagagctgaaggataatattgaattcagaggtcataagccacttaacagcatcactgtttcaaagaaacgcaattggctatatcagagtactctgaggcctcttaatctggaagaagaaaataagaaatgccaagatagaagtcatttatccatctcacctgtgtctctacctaaacatcagctatcacagtctttcctcaaatcatctaaagagtactgtacatatgtggtatgtaacgctacaaactcttcattatcgaaaaactgtgctttagattttaatgaggaaaatgatgcagatgatgaaggagaaatatggtacaatcccattcctgaggatgatgaccttggtatatcaagtgccttgagttttggtgaggccgactctgctgttctgaagctccctgctgtcaatttgagcatgttgtctggcagtgacctgatgaaagcagagcggcatactgaagactcactgtgctcttccgaacatgcaggtgatattcagaccacacggtcaaatggaatgaatcctatacatcctgcccattccacagaatttgtgcagcagtacaagcaaaagctaggacacaagacacaagaaggtataatggtggaggacagtcccatgttgaaatctccttttgcaggttctgggatcctggctgctacaaatagtactgaattgggaattatggaaccatcttctccaaatcctagccctgtgaaaaaaggcagttcaattaattggtcattgccagataaaataaaatctccacgaactgtgaggaaactttccatgaaaatgaaaaagttgccagaatttagccgaaagctaagcgttaagggaacattgaattatataaacagtccagataatactccttctttgtctaaatataactgccgagaagttcatcatactgatattctgccctctgggaacacaaccaccgctgctaagaggaatgttataagccgataccatcttgataccagtgtatcctcccagcagagctaccagaagaaaaactctatgagttctaagtattcctgcaaaggtggttaccttagtgatggagactcacctgaacttacaactaaagctagcaaacatggatctgaaaacaaatttggaaaaggaaaagaaataatttcaaatagttgtagcaagaatgaaatagacattgatgcttttaggcattatagcttttctgatcaacctaagtgttcacagtacatatctgggctcatgagtgtacatttctatggtgctgaggatttaaaaccacctcggatagattcaaaagacgtcttttgtgcaattcaggtagattcagtaaacaaagcaagaacagctttgctcacatgccgaacaacatttttagacatggatcacactttcaacatagaaattgaaaatgcacaacatttgaaactagtagtattcagttgggaacccactccaagaaaaaatcgagtttgttgtcatggaactgttgttcttcccaccttatttagagtgacaaagactcatcagttggctgtcaaacttgaacctagaggtcttatttatgtgaaagtgactcttatggaacagtgggagaattctcttcatggactagatataaaccaagaaccaataatatttggagttgatattcaaaaagttgtagagaaagaaaatataggactgatggtgccccttctgatacagaaatgtattatggaaattgaaaagagaggctgtcaggtagtaggcctgtatcgattatgtggttcggcagcagtcaagaaagaactgcgagaggcttttgagagagatagcaaagctgttggtctgtgtgaaaaccagtacccagatataaatgtaataacaggtgttcttaaggattatttaagagaactcccttctcctctgataacaaagcagctttatgaggctgtattagatgcaatggcaaaaagtcctttgaaaatgtcatcaaatggttgtgagaatgacccaggtgactctaagtacactgttgacctgctggattgtctgccagagattgagaaggcaaccctaaagatgttgttggatcatttgaaattggtggcttcctatcatgaagtgaataagatgacgtgccagaatttggctgtgtgctttggaccagtattattaagtcagaggcaagagccttccacccataacaacagagtctttactgattcagaagaacttgcaagtgctttggattttaaaaaacacattgaagttcttcattacttactccaactctggccagtgcagcgtttaactgtcaaaaaatcaacagacaatttattcccagagcagaagtcttctctgaattatctgaggcagaagaaagaacgacctcatatgttaaatttgagtggtactgattcatcaggagtacttaggccaaggcaaaaccgattagacagtccacttagcaatcgttatgcaggagactggagcagctgtggggaaaactactttttaaatacaaaagaaaatttaaatgatgtggattatgatgatgtcccttcagaagatagaaaaatcggagaaaattatagcaaaatggatgggccagaagtaatgattgaacagccaattcccatgtccaaagagtgtacatttcagacatatttgacaatgcagacagttgagtctacagtggatcgaaaaaacaatctcaaagatctacaagaaagtattgatactttgattggaaatctggaacgtgagctcaacaaaaacaagcttaatatgagtttttgagattgagggtttttttttgtaatgtcttaaagtttcaaatctgtttttgttttattttcttataccacccacagcgatgttttcatttttttactcttgaaatctttaattaatttttaataagtttatctgattcaattaaaaacactattcattaatacaatttttacttatctcactagaaaacttttctggggatcaataaaacttggacttcttgggatattttactaaatcttgccaactctatggagataactttcaaatgcacttaagaaggttcacataagttattagcccctcaaggtttttctgctttatgggaaccactcttctgtagctgagacagatgtccttttttttgttgttttttgagacagagtctcactctgtcgcccaggctggagtgcactggtgcgatctcaggtcactgcaacctccacctccctggttcaagtgattctcctgccacagcctcccgagtagctgtgatgacggggcccaccaccatgcccagctaattattgtatttttagtaaagatggggtttcaccatgttggccaggctggtctcgaactcctgatctcagatgatccgcccaccttggcctcccaaagtgctgggattacaggcgtgagccactgcgcctggcctctagatgttcttttagaggaacatcacagctgctcagtctgatttgcagtactggtcctggtacactgcaacatcctttggtcaaattttatttgtaatgcaaatgctgctataagaaaatctttttataaataaaagtgaaattatacaagtattaatgttttctgtattaacagtaattatttaagcttataaaaattaaatatttttataatcctgaaactgtatatatttataaatgcatatatgtatagatatcaggatgggggaggggttattgtagaatcacatgtatttttaaagtatatatgtcatgaggccaaaattattatcttaaagtatttttttcagggaaagaacatttaaattaaaggaggaattacataaaaacacttgaacaataatactctagaagcatctga

SEQ ID NO: 470 - protein, 1194 aa, Homo Sapiens
MHDLPPDSGARRGGRGLADHSFPAGARAPGQPPSRGAAYRRACPRDGERGGGGRPRQQVSPPRSPQREPRGGQLRTPRMRPSCSRSLESLRVGAKPPPFQRWPSDSWIRCGAHRDWDEPPPRGGRMDGWSGDRARAAAPTGLQPPGCKDHGCSSGSPFRDPAGSSVIRSGKGDRQEGPSFLRPPAVTVKKLQKWMYKGRLLSLGMKGRARGTAPKVTGTQAASPNVGALKVRENRVLSVPPDQRITLTDLFENAYGSSMKGRELEELKDNIEFRGHKPLNSITVSKKRNWLYQSTLRPLNLEEENKKCQDRSHLSISPVSLPKHQLSQSFLKSSKEYCTYVVCNATNSSLSKNCALDFNEENDADDEGEIWYNPIPEDDDLGISSALSFGEADSAVLKLPAVNLSMLSGSDLMKAERHTEDSLCSSEHAGDIQTTRSNGMNPIHPAHSTEFVQQYKQKLGHKTQEGIMVEDSPMLKSPFAGSGILAATNSTELGIMEPSSPNPSPVKKGSSINWSLPDKIKSPRTVRKLSMKMKKLPEFSRKLSVKGTLNYINSPDNTPSLSKYNCREVHHTDILPSGNTTTAAKRNVISRYHLDTSVSSQQSYQKKNSMSSKYSCKGGYLSDGDSPELTTKASKHGSENKFGKGKEIISNSCSKNEIDIDAFRHYSFSDQPKCSQYISGLMSVHFYGAEDLKPPRIDSKDVFCAIQVDSVNKARTALLTCRTTFLDMDHTFNIEIENAQHLKLVVFSWEPTPRKNRVCCHGTVVLPTLFRVTKTHQLAVKLEPRGLIYVKVTLMEQWENSLHGLDINQEPIIFGVDIQKVVEKENIGLMVPLLIQKCIMEIEKRGCQVVGLYRLCGSAAVKKELREAFERDSKAVGLCENQYPDINVITGVLKDYLRELPSPLITKQLYEAVLDAMAKSPLKMSSNGCENDPGDSKYTVDLLDCLPEIEKATLKMLLDHLKLVASYHEVNKMTCQNLAVCFGPVLLSQRQEPSTHNNRVFTDSEELASALDFKKHIEVLHYLLQLWPVQRLTVKKSTDNLFPEQKSSLNYLRQKKERPHMLNLSGTDSSGVLRPRQNRLDSPLSNRYAGDWSSCGENYFLNTKENLNDVDYDDVPSEDRKIGENYSKMDGPEVMIEQPIPMSKECTFQTYLTMQTVESTVDRKNNLKDLQESIDTLIGNLERELNKNKLNMSF

SEQ ID NO: 471 - DNA, 3557 bp, Homo Sapiens
agcatttgtcactcaacctctgaatgttagtgacactattgggacgaaaaaggactgtgctggcccaaatggcaggcatctcatatgtggcatctttctttctccttctgactaagctcagcattggccagagagaagtaacagttcagaaaggaccactgtttagagctgaaggttacccagtcagcattggctgcaatgtaactggccaccagggaccttctgagcagcatttccagtggtctgtttacctgccgacaaacccgacccaggaagtccagatcattagcaccaaggatgctgccttctcttacgcagtatatacgcagcgggtgcgaagcggagacgtctacgtggagagggtccagggcaactcagtcttgttgcacatctcaaaactccagatgaaggatgctggcgagtatgagtgtcacacaccaaacactgatgagaaatactatggaagttacagtgcaaagactaatctaattgttattccagataccctctctgccaccatgagttctcagactctcggtaaggaggaaggtgagccattagccctcacctgtgaggcatccaaagccacagcccaacatactcacctctctgtcacctggtacctaacacaggatggaggaggaagccaagccactgagattatttctctctccaaagattttatattggtccctgggcccttgtatacagagcggtttgcagccagtgacgtacagctcaacaaactgggacccactacattcaggctgtccatagagaggctccagtcctcagatcagggtcagctgttctgtgaggcaacggaatggattcaggatccagatgaaacttggatgttcatcaccaaaaagcagaccgatcaaaccactctgaggatccagccagcagtgaaagattttcaagtcaacattacagctgacagcttgtttgctgaagggaaacccttagaactggtttgcctggttgtaagcagtggccgtgacccacagcttcaaggcatttggttcttcaatgggactgaaattgctcacattgatgctggtggagtcctgggcctgaagaatgactacaaagagagagcaagtcaaggagagctccaggtttcaaagttaggccccaaggctttctctctcaagatcttctctctgggcccagaggatgaaggcgcctacagatgtgtggtagcagaggtcatgaaaacacgcacaggttcctggcaggtgcttcagagaaagcagtcaccagacagccacgtgcacctgaggaagccagcagcaagaagtgtggtcatgtctaccaagaacaagcagcaagttgtgtgggaaggagagacactcgcctttctctgtaaggctggtggagctgaaagtcccctgtctgtgagctggtggcacatcccacgggaccagacacagcccgagtttgtggctggcatggggcaggatggcattgtgcagctgggtgcctcctatggggtacccagttaccatggcaacacaaggctggagaaaatggactgggccaccttccagctggagatcaccttcactgccatcacagacagtggcacatatgagtgcagagtatctgagaagtctcggaaccaggccagagatctgagctggactcagaagatttcagttactgtaaagtctctggagtcaagtttacaagttagtctgatgagccgtcagccgcaagtgatgttaaccaacacctttgacctgtcctgtgtcgtgagggccggttactctgacctcaaggtgccactcactgtgacgtggcagttccagccagctagctctcacatcttccaccagcttattcgaatcacccacaatggcactattgaatgggggaatttcctatcccggttccaaaagaagacgaaagtgtcgcagtctttatttcgttcacaactcctagtccatgatgccactgaggaagagacaggagtgtatcagtgtgaagtagaagtttatgacagaaattccctatacaacaaccgccccccgagggcttctgccatctctcacccactgaggatagccgtcactttaccagagagcaagctaaaagtgaattcaaggagtcaagtccaagagctctccatcaactccaacactgatatagaatgtagcatcttgtcccggtccaatggaaaccttcagttagccattatttggtatttttctcctgtttccactaatgcctcttggctaaagatcctggagatggaccaaaccaatgttataaaaactggggatgagtttcacaccccacagagaaaacaaaaatttcatactgagaaggtttcccaagacttatttcagctgcacattctgaatgtggaagacagcgatcggggcaaatatcactgtgctgtggaggaatggctcctgtctacaaatggcacttggcacaagcttggagaaaagaagtcaggactaacagaattgaaactcaagcccacaggaagtaaggtacgtgtctccaaagtgtactggaccgaaaatgtgactgagcacagagaagtggccatccgctgcagcctggagagtgtaggcagctcagccactctgtactctgtgatgtggtactggaacagagaaaactctggaagtaaattgctggtgcacttgcaacatgatggcttgctggagtatggggaagaggggctcaggaggcacctgcactgttaccgttcatcctctacagactttgtcctgaagcttcatcaggtggagatggaggatgcaggaatgtactggtgtagggtggcagagtggcagctccatggacacccaagcaagtggattaatcaagcatccgatgagtcacagcggatggtgctcacggtgctgccttcagagcccacgcttccttccaggatctgctcctcggcccctttactctatttcctgttcatctgtcccttcgtcctgctcctccttctgctcatctccctcctctgcttatactggaaggccaggaagttgtcaacactgcgttccaacacacggaaagaaaaagctctctgggtggacttgaaagaggctggaggtgtgaccacaaataggagggaagacgaggaggaagatgaaggcaactgaatcccaagaggcacctgcagccaggaaggaaagcttgttttacagcttcctgccttgctgcctgtttcttcccaagccccgtgtggaatgtggtgacctagtcacctggaaccagctcctgacagaccccggcaacttctagatgaacccaagtgaactttcctcattaccatcctgaagtcactaccccagggggagctatagcttcatgaccgtaacatgtgacctgtgtgctggcaggacgactcactgcggctgcgccactgggacccctcccctacatgcaccaatgcactctctcccctctccatcaccccataaaaccctcctgtcactttccttcagagacaccgctttggagagtattcccagcgctctccttgcttgtgacaagtaaaaaaaaaaaaaaactccttttcatca

SEQ ID NO: 472 - protein, 1021 aa, Homo Sapiens
MAGISYVASFFLLLTKLSIGQREVTVQKGPLFRAEGYPVSIGCNVTGHQGPSEQHFQWSVYLPTNPTQEVQIISTKDAAFSYAVYTQRVRSGDVYVERVQGNSVLLHISKLQMKDAGEYECHTPNTDEKYYGSYSAKTNLIVIPDTLSATMSSQTLGKEEGEPLALTCEASKATAQHTHLSVTWYLTQDGGGSQATEIISLSKDFILVPGPLYTERFAASDVQLNKLGPTTFRLSIERLQSSDQGQLFCEATEWIQDPDETWMFITKKQTDQTTLRIQPAVKDFQVNITADSLFAEGKPLELVCLVVSSGRDPQLQGIWFFNGTEIAHIDAGGVLGLKNDYKERASQGELQVSKLGPKAFSLKIFSLGPEDEGAYRCVVAEVMKTRTGSWQVLQRKQSPDSHVHLRKPAARSVVMSTKNKQQVVWEGETLAFLCKAGGAESPLSVSWWHIPRDQTQPEFVAGMGQDGIVQLGASYGVPSYHGNTRLEKMDWATFQLEITFTAITDSGTYECRVSEKSRNQARDLSWTQKISVTVKSLESSLQVSLMSRQPQVMLTNTFDLSCVVRAGYSDLKVPLTVTWQFQPASSHIFHQLIRITHNGTIEWGNFLSRFQKKTKVSQSLFRSQLLVHDATEEETGVYQCEVEVYDRNSLYNNRPPRASAISHPLRIAVTLPESKLKVNSRSQVQELSINSNTDIECSILSRSNGNLQLAIIWYFSPVSTNASWLKILEMDQTNVIKTGDEFHTPQRKQKFHTEKVSQDLFQLHILNVEDSDRGKYHCAVEEWLLSTNGTWHKLGEKKSGLTELKLKPTGSKVRVSKVYWTENVTEHREVAIRCSLESVGSSATLYSVMWYWNRENSGSKLLVHLQHDGLLEYGEEGLRRHLHCYRSSSTDFVLKLHQVEMEDAGMYWCRVAEWQLHGHPSKWINQASDESQRMVLTVLPSEPTLPSRICSSAPLLYFLFICPFVLLLLLLISLLCLYWKARKLSTLRSNTRKEKALWVDLKEAGGVTTNRREDEEEDEGN

SEQ ID NO: 473 - DNA, 478 bp, Homo Sapiens
gtgtgccggatttggttagctgagcccaccgagaggcgcctgcaggatgaaagctctctgtctcctcctcctccctgtcctggggctgttggtgtctagcaagaccctgtgctccatggaagaagccatcaatgagaggatccaggaggtcgccggctccctaatatttagggcaataagcagcattggcctggagtgccagagcgtcacctccaggggggacctggctacttgcccccgaggcttcgccgtcaccggctgcacttgtggctccgcctgtggctcgtgggatgtgcgcgccgagaccacatgtcactgccagtgcgcgggcatggactggaccggagcgcgctgctgtcgtgtgcagccctgaggtcgcgcgcagcgcgtgcacagcgcgggcggaggcggctccaggtccggaggggttgcgggggagctggaaataaacctggagatgatgatgatgatgatgatg

SEQ ID NO: 474 - protein, 108 aa, Homo Sapiens
MKALCLLLLPVLGLLVSSKTLCSMEEAINERIQEVAGSLIFRAISSIGLECQSVTSRGDLATCPRGFAVTGCTCGSACGSWDVRAETTCHCQCAGMDWTGARCCRVQP

SEQ ID NO: 475 - DNA, 5762 bp, Homo Sapiens
acagaaggcagttcacctctgctcccgacagcctgggaacccgcaagagccccagcatttgaagtctggtcttgtgaaaccccaccctcctctggctgtgtgattgaatgggatgccctcgaggttcacctcacctgagagggttttgggcagatcagcagtaaggtgttaaattttagaagcctgaaaactccagaagagaaaggccaaccaactcaaacttgaagacatgaaatccccaaggagaaccactttgtgcctcatgtttattgtgatttattcttccaaagctgcactgaactggaattacgagtctactattcatcctttgagtcttcatgaacatgaaccagctggtgaagaggcactgaggcaaaaacgagccgttgccacaaaaagtcctacggctgaagaatacactgttaatattgagatcagttttgaaaatgcatccttcctggatcctatcaaagcctacttgaacagcctcagttttccaattcatgggaataacactgaccaaattaccgacattttgagcataaatgtgacaacagtctgcagacctgctggaaatgaaatctggtgctcctgcgagacaggttatgggtggcctcgggaaaggtgtcttcacaatctcatttgtcaagagcgtgacgtcttcctcccagggcaccattgcagttgccttaaagaactgcctcccaatggacctttttgcctgcttcaggaagatgttaccctgaacatgagagtcagactaaatgtaggctttcaagaagacctcatgaacacttcctccgccctctataggtcctacaagaccgacttggaaacagcgttccggaagggttacggaattttaccaggcttcaagggcgtgactgtgacagggttcaagtctggaagtgtggttgtgacatatgaagtcaagactacaccaccatcacttgagttaatacataaagccaatgaacaagttgtacagagcctcaatcagacctacaaaatggactacaactcctttcaagcagttactatcaatgaaagcaatttctttgtcacaccagaaatcatctttgaaggggacacagtcagtctggtgtgtgaaaaggaagttttgtcctccaatgtgtcttggcgctatgaagaacagcagttggaaatccagaacagcagcagattctcgatttacaccgcacttttcaacaacatgacttcggtgtccaagctcaccatccacaacatcactccaggtgatgcaggtgaatatgtttgcaaactgatattagacatttttgaatatgagtgcaagaagaaaatagatgttatgcccatccaaattttggcaaatgaagaaatgaaggtgatgtgcgacaacaatcctgtatctttgaactgctgcagtcagggtaatgttaattggagcaaagtagaatggaagcaggaaggaaaaataaatattccaggaacccctgagacagacatagattctagctgcagcagatacaccctcaaggctgatggaacccagtgcccaagcgggtcgtctggaacaacagtcatctacacttgtgagttcatcagtgcctatggagccagaggcagtgcaaacataaaagtgacattcatctctgtggccaatctaacaataaccccggacccaatttctgtttctgagggacaaaacttttctataaaatgcatcagtgatgtgagtaactatgatgaggtttattggaacacttctgctggaattaaaatataccaaagattttataccacgaggaggtatcttgatggagcagaatcagtactgacagtcaagacctcgaccagggagtggaatggaacctatcactgcatatttagatataagaattcatacagtattgcaaccaaagacgtcattgttcacccgctgcctctaaagctgaacatcatggttgatcctttggaagctactgtttcatgcagtggttcccatcacatcaagtgctgcatagaggaggatggagactacaaagttactttccatacgggttcctcatcccttcctgctgcaaaagaagttaacaaaaaacaagtgtgctacaaacacaatttcaatgcaagctcagtttcctggtgttcaaaaactgttgatgtgtgttgtcactttaccaatgctgctaataattcagtctggagcccatctatgaagctgaatctggttcctggggaaaacatcacatgccaggatcccgtaataggtgtcggagagccggggaaagtcatccagaagctatgccggttctcaaacgttcccagcagccctgagagtcccattggcgggaccatcacttacaaatgtgtaggctcccagtgggaggagaagagaaatgactgcatctctgccccaataaacagtctgctccagatggctaaggctttgatcaagagcccctctcaggatgagatgctccctacatacctgaaggatctttctattagcatagacaaagcggaacatgaaatcagctcttctcctgggagtctgggagccattattaacatccttgatctgctctcaacagttccaacccaagtaaattcagaaatgatgacgcacgtgctctctacggttaatgtcatccttggcaagcccgtcttgaacacctggaaggttttacaacagcaatggaccaatcagagttcacagctactacattcagtggaaagattttcccaagcattacagtcgggagatagccctcctttgtccttctcccaaactaatgtgcagatgagcagcatggtaatcaagtccagccacccagaaacctatcaacagaggtttgttttcccatactttgacctctggggcaatgtggtcattgacaagagctatctagaaaacttgcagtcggattcgtctattgtcaccatggctttcccaactctccaagccatccttgcccaggatatccaggaaaataactttgcagagagcttagtgatgacaaccactgtcagccacaatacaactatgccattcaggatttcaatgacttttaagaacaatagcccttcaggcggcgaaacgaagtgtgtcttctggaacttcaggcttgccaacaacacaggggggtgggacagcagtgggtgctatgtagaagaaggtgatggggacaatgtcacctgtatctgtgaccacctaacatcattctccatcctcatgtcccctgactccccagatcctagttctctcctgggaatactcctggatattatttcttatgttggggtgggcttttccatcttgagcttggcagcctgtctagttgtggaagctgtggtgtggaaatcggtgaccaagaaccggacttcttatatgcgccacacctgcatagtgaatatcgctgcctcccttctggtcgccaacacctggttcattgtggtcgctgccatccaggacaatcgctacatactctgcaagacagcctgtgtggctgccaccttcttcatccacttcttctacctcagcgtcttcttctggatgctgacactgggcctcatgctgttctatcgcctggttttcattctgcatgaaacaagcaggtccactcagaaagccattgccttctgtcttggctatggctgcccacttgccatctcggtcatcacgctgggagccacccagccccgggaagtctatacgaggaagaatgtctgttggctcaactgggaggacaccaaggccctgctggctttcgccatcccagcactgatcattgtggtggtgaacataaccatcactattgtggtcatcaccaagatcctgaggccttccattggagacaagccatgcaagcaggagaagagcagcctgtttcagatcagcaagagcattggggtcctcacaccactcttgggcctcacttggggttttggtctcaccactgtgttcccagggaccaaccttgtgttccatatcatatttgccatcctcaatgtcttccagggattattcattttactctttggatgcctctgggatctgaaggtacaggaagctttgctgaataagttttcattgtcgagatggtcttcacagcactcaaagtcaacatccctgggttcatccacacctgtgttttctatgagttctccaatatcaaggagatttaacaatttgtttggtaaaacaggaacgtataatgtttccaccccagaagcaaccagctcatccctggaaaactcatccagtgcttcttcgttgctcaactaagaacaggataatccaacctacgtgacctcccggggacagtggctgtgcttttaaaaagagatgcttgcaaagcaatggggaacgtgttctcggggcaggtttccgggagcagatgccaaaaagactttttcatagagaagaggctttcttttgtaaagacagaataaaaataattgttatgtttctgtttgttccctccccctcccccttgtgtgataccacatgtgtatagtatttaagtgaaactcaagccctcaaggcccaacttctctgtctatattgtaatatagaatttcgaagagacattttcactttttacacattgggcacaaagataagctttgattaaagtagtaagtaaaaggctacctaggaaatacttcagtgaattctaagaaggaaggaaggaagaaaggaaggaaagaagggagggaaacagggagaaagggaaaaagaagaaaaagagaaagatgaaaataggaacaaataaagacaaacaacattaagggccatattgtaagatttccatgttaatgatctaatataatcactcagtgcaacattgagaatttttttttaatggctcaaaaatggaaactgaaagcaagtcatggggaatgaatactttgggcagtatcttcctgatgtcttcttagctaagaggaggaaaaaaaggctgaaaaaatagggaggaaattccttcatcagaacgacttcaagtggataacaatatttataagaaatgaatggaaggaaatatgatcctcctgagactaactttgtatgttaaggtttgaactaagtgaatgtatctgcagaggaagtattacaaagatatgtcattagatccaagtgctgattaaatttttatagtttatcagaaaagccttatattttagtttgttccacattttgaaagcaaaaaatatatatttgatatacccttcaattgccaaatttgatatgttgcactgaagacagaccctgtcatatatttaatggcttcaagcaggtacttctctgtgcattatagaatagattttaataatcttatagcattgtatattattattgctgttgtcactgttattattattgtggatactggcccttggtgtgttgcatagctccctatgtattctctgtttccatctttaagttcccagaccaatatacattaagagttttgcatggtctaaattgtgtttattccaaccacgtggaaagctcctggaaagaaattttacattcggttgttctgtgctcctaatgacacttgaccttgttgaacaaatggcagagcctttcccaaggatttgattgtttgtgaattatctgcatgtgtgcttttttttggtgtgtatttcattaaaaaatataaatatttatgaaaattgcacgcatattagagttaaccatgtactattgatacagcaacgctacattgcaaataaaagtccgatcccaaaaggagaatgagacaaaaaaaaaa

SEQ ID NO: 476 - protein, 1346 aa, Homo Sapiens
MKSPRRTTLCLMFIVIYSSKAALNWNYESTIHPLSLHEHEPAGEEALRQKRAVATKSPTAEEYTVNIEISFENASFLDPIKAYLNSLSFPIHGNNTDQITDILSINVTTVCRPAGNEIWCSCETGYGWPRERCLHNLICQERDVFLPGHHCSCLKELPPNGPFCLLQEDVTLNMRVRLNVGFQEDLMNTSSALYRSYKTDLETAFRKGYGILPGFKGVTVTGFKSGSVVVTYEVKTTPPSLELIHKANEQVVQSLNQTYKMDYNSFQAVTINESNFFVTPEIIFEGDTVSLVCEKEVLSSNVSWRYEEQQLEIQNSSRFSIYTALFNNMTSVSKLTIHNITPGDAGEYVCKLILDIFEYECKKKIDVMPIQILANEEMKVMCDNNPVSLNCCSQGNVNWSKVEWKQEGKINIPGTPETDIDSSCSRYTLKADGTQCPSGSSGTTVIYTCEFISAYGARGSANIKVTFISVANLTITPDPISVSEGQNFSIKCISDVSNYDEVYWNTSAGIKIYQRFYTTRRYLDGAESVLTVKTSTREWNGTYHCIFRYKNSYSIATKDVIVHPLPLKLNIMVDPLEATVSCSGSHHIKCCIEEDGDYKVTFHTGSSSLPAAKEVNKKQVCYKHNFNASSVSWCSKTVDVCCHFTNAANNSVWSPSMKLNLVPGENITCQDPVIGVGEPGKVIQKLCRFSNVPSSPESPIGGTITYKCVGSQWEEKRNDCISAPINSLLQMAKALIKSPSQDEMLPTYLKDLSISIDKAEHEISSSPGSLGAIINILDLLSTVPTQVNSEMMTHVLSTVNVILGKPVLNTWKVLQQQWTNQSSQLLHSVERFSQALQSGDSPPLSFSQTNVQMSSMVIKSSHPETYQQRFVFPYFDLWGNVVIDKSYLENLQSDSSIVTMAFPTLQAILAQDIQENNFAESLVMTTTVSHNTTMPFRISMTFKNNSPSGGETKCVFWNFRLANNTGGWDSSGCYVEEGDGDNVTCICDHLTSFSILMSPDSPDPSSLLGILLDIISYVGVGFSILSLAACLVVEAVVWKSVTKNRTSYMRHTCIVNIAASLLVANTWFIVVAAIQDNRYILCKTACVAATFFIHFFYLSVFFWMLTLGLMLFYRLVFILHETSRSTQKAIAFCLGYGCPLAISVITLGATQPREVYTRKNVCWLNWEDTKALLAFAIPALIIVVVNITITIVVITKILRPSIGDKPCKQEKSSLFQISKSIGVLTPLLGLTWGFGLTTVFPGTNLVFHIIFAILNVFQGLFILLFGCLWDLKVQEALLNKFSLSRWSSQHSKSTSLGSSTPVFSMSSPISRRFNNLFGKTGTYNVSTPEATSSSLENSSSASSLLN

SEQ ID NO: 477 - DNA, 5552 bp, Homo Sapiens
gagaagagcagctcacccttcgcagccgcgatgggggaagacgacgccgcgcttcgggctggcagcagggggctctccgacccgtgggcagactcagtgggagtgcgaccccgcaccacggagcgccacatcgccgtacacaagcggcttgtgctggccttcgctgtgtccctcgtggcattgctcgcggtcacaatgctcgctgtgctgctcagcctgcgcttcgacgagtgcggggcgagtgccacgccaggcgccgacggtggcccctcaggctttccggagcgcggcggcaacgggagcctccctggatcggcccggcgcaaccaccacgcaggcggggactcctggcagcccgaggcgggtggggtggccagtccggggaccacgtcggcccagccgccgtcggaggaggagcgggagccgtgggagccgtggacgcagctgcgcctgtcgggccacctgaagccgctgcactacaatctgatgctcaccgccttcatggagaacttcaccttctccggggaggtcaacgtggagatcgcgtgccggaacgccacccgctacgtagtgctgcacgcttcccgagtggcggtggagaaagtgcagctggccgaggaccgggcgttcggggctgtccctgtagccggttttttcctctacccgcaaacccaggtcttagtggtggtgctgaataggacactggacgcgcagaggaattacaatctgaagattatctacaacgcgctcatcgagaatgagctcctgggcttcttccgcagctcctatgtgctccacggggagagaagattccttggtgttactcagttttcgcctacacatgccagaaaggcatttccttgttttgatgagccaatctacaaggctactttcaaaatcagcatcaagcatcaagcaacctatttatctttatctaatatgccagtggaaacttccgtgtttgaggaagatggatgggttacggatcacttttcacagacccctctcatgtccacatattatttagcctgggcaatttgcaacttcacatacagagaaactaccaccaagagtggggttgtagtacgattatatgcaagacctgatgctatcagaagaggatccggggactatgctctccatataacaaagagattaatagaattttatgaagactactttaaagtgccctattccttgccaaaactagatcttttagctgtgcctaagcatccgtatgctgctatggagaactggggactaagtatttttgtggaacaaagaatactgctggatcccagtgtttcatctatttcttatttgctggatgtcaccatggtcattgttcatgagatatgtcaccagtggtttggtgaccttgtgacgcctgtgtggtgggaagacgtgtggctgaaggaagggtttgctcactactttgaatttgttggtacagactacctctatcctggctggaacatggaaaagcagaggtttctgaccgatgttctgcatgaagtgatgctgctggacggtttggccagttcccatccagtatcacaggaagtgctgcaggcaacagatattgacagggtgtttgactggatcgcatataaaaagggtgctgctttaataagaatgctggctaattttatgggccattcagttttccagaggggtttgcaagattatttaaccattcataagtatggtaatgcagccagaaatgatctctggaatacattatcggaggctttaaaaagaaatgggaaatatgtaaatatacaagaagtaatggatcagtggacactccagatgggttatcctgttatcaccatcttgggaaacacaacagcagaaaatagaataataattacccaacagcattttatctatgatatcagtgctaaaactaaagcacttaaacttcagaataacagttacctgtggcagattccattaactattgtggtaggaaatagaagccatgtgtcttcagaagcaattatttgggtgtctaacaaatcagagcaccacagaataacttatttggacaaaggaagctggctgctggggaacatcaatcaaactggctattttagagtcaactatgacctaaggaactggagattattaattgatcaattaatccggaatcatgaggttctttctgtcagtaaccgagcgggcttgatcgatgatgccttcagcctagccagggctggctatttgcctcagaatattcctctggagattatcagatacctgtctgaggagaaggattttcttccttggcatgctgccagccgagctctttatcctctagataaattactggaccgcatggaaaactacaacattttcaatgaatatattttaaagcaagttgcaacaacatatatcaagcttgggtggccgaaaaataattttaatggatctcttgttcaagcatcctaccaacatgaagaactacgtagagaagttataatgctggcctgcagttttggcaacaagcactgtcaccaacaggcatcaacacttatttcagattggatttccagcaacaggaacagaataccactaaatgttagagacatcgtatactgtacaggagtgtcactactggatgaggatgtctgggaattcatatggatgaaattccattccaccacagcagtttctgagaagaaaatattattggaagccttaacttgcagtgatgacaggaatttattaaacaggcttctaaatctgtcactgaattctgaggtggtgctggatcaagatgcaattgatgtcataatccatgtagctcgaaatccacatggtcgagaccttgcctggaagtttttcagggataaatggaagatattaaataccaggtatggagaagcattgtttatgaattccaaactcatcagtggtgtcacagaatttcttaatactgaaggtgaactcaaagagctcaagaacttcatgaaaaactatgatggggtagctgctgcttctttctcacgagctgtggaaactgtcgaagccaatgtgcgctggaaaatgctttaccaagacgagcttttccaatggttaggaaaagctctaagacactaatatatgtatcttataaacaaacaattcaactcagaagtttatgagaagacacgctttttgtggaatgaggaaaatgtactacctagaaaatggccagattttcagtgttaacgtgtgggaggaattttttttttagtttttattttttggttttgggggatattttttatttgtttcattcattctgttctgtttctctactgggtgttcctctctaaagaaactcttgcaagtgaaactagccatgattgcttcagctgtacattccttgctgtacaggaccaaatatgatagtgatgcatgttgatgttacagtcaatttggaaaaacatattcagaatatctgtgcatggatatattgtcctgcctgtgttccagcatgcttatttcaaacgtccagtgttgtgtgtgaatatgtgttacacctaggatgggcattatgcaaaagcacaaagattatatatgacaatcagtattgcaatgaaagaaaaactaaaaacagaaatgatattctcaattttgggcaatgtgagaggtaaaatagcccttgacatgatgaacatcacttatttcagcacttggattgtctggcaatgattactgtgttgctaactcattttctttgagttaaagctgtgtatacattttaaaaggcatatagatagtgtatgcatatgtatatgtacatagggaagccccatatgtatatagtatgttgtacactgcacatgtacaaagaatgtcttcagatcaaagaaaatttatctctttttataaacttaaggacagttgcaaaaggcttcaaggaatttatctcaacattattctttctatgtcctaactaaatttctcaactgttatgaatttttcatctacttcttgaacagtggtctattctgctacatgaagatgaatacaaacaaaatttttgtataaactactattccagttctcctgtgtcagtcttgcctatagattttgccatcgttttctgtcaaagttccttttgcatgaaacaattatgcaaacttataattattagtgctgaaaaagagtttattttccatcttgtttgttttcctaccttatgctgagtagtccagagagttaaaaaaattctctgcatgttggtcttttaagtctgttttgctctaatcctccattaagcgagcatacctcaagtgggtctattagcatttaatgaccttttgtgccagttgtgccatcccttaagatgaaaagttccttttcttgtgttaatgtacaaagcttttcttttggcactgacaactgtgttctacctgggaattttgaatagccattttcatggctgtgtgttgtgtaacacaaatgtttttaaatggtattctcacccagtaggccagctctccaaacgttgcttagatgcttcaaaattagcatattttaagtttaccagtataaaataccaatgcaactactctacatagccaaatgtttgtaaatcacgtcttattttcctgaggtttttcactccaccaaatcttacaaatcattgaaagaaatatattctaacagtacgcactgaatagtgaaaataattagacattttaagaaccagagccatagaattattttaaattagtagaaaagaggagctatttccgaatctatagaataaagtaccacctaaaactgaattttatcatataagcaagtaatacctattagtcatacctaaatttttcagcacttcattcaattaaaatacatgaattttaaatattttacatgatgtgaataggcatgataatacttttagtataaaatctaaactttttccatttatcagaaatgataaaatccagttaccacatatcacgtttataaaatccttaattaaatgagtaacttctaaaatataacaatactaaatatcacactgcgatggaggtcccaaatatgtggtctatcaccactgaattcatgtaatagataagaaaaaaattagaggtggatgtcttgttttgtgtcatgaattactaaaatctcttagtagttgtggtatatttttgagtaaaattaccatttccagatttgagtttgaagggcttttatagttgtattttcctcctcactgttaataatcataatcctttttcagtattttagtggccttgaacaactggtttatctacaatctcaaatcctaagtgtataattatgtgcaatgttcaatacctcatataatacttgctcaacagtatagtggtaccaatggcattaagatggtgtttttgttctacatatttttcaataatttattctttctaatgttgaaattatatcaggctttaccggtttttttagttgtttaaataagtaatattttcaaaagaataaaataaccaatgatatctcttggaataatctgtaaaacgtagttataaaattctattttctactta

SEQ ID NO: 478 - protein, 1024 aa, Homo Sapiens
MGEDDAALRAGSRGLSDPWADSVGVRPRTTERHIAVHKRLVLAFAVSLVALLAVTMLAVLLSLRFDECGASATPGADGGPSGFPERGGNGSLPGSARRNHHAGGDSWQPEAGGVASPGTTSAQPPSEEEREPWEPWTQLRLSGHLKPLHYNLMLTAFMENFTFSGEVNVEIACRNATRYVVLHASRVAVEKVQLAEDRAFGAVPVAGFFLYPQTQVLVVVLNRTLDAQRNYNLKIIYNALIENELLGFFRSSYVLHGERRFLGVTQFSPTHARKAFPCFDEPIYKATFKISIKHQATYLSLSNMPVETSVFEEDGWVTDHFSQTPLMSTYYLAWAICNFTYRETTTKSGVVVRLYARPDAIRRGSGDYALHITKRLIEFYEDYFKVPYSLPKLDLLAVPKHPYAAMENWGLSIFVEQRILLDPSVSSISYLLDVTMVIVHEICHQWFGDLVTPVWWEDVWLKEGFAHYFEFVGTDYLYPGWNMEKQRFLTDVLHEVMLLDGLASSHPVSQEVLQATDIDRVFDWIAYKKGAALIRMLANFMGHSVFQRGLQDYLTIHKYGNAARNDLWNTLSEALKRNGKYVNIQEVMDQWTLQMGYPVITILGNTTAENRIIITQQHFIYDISAKTKALKLQNNSYLWQIPLTIVVGNRSHVSSEAIIWVSNKSEHHRITYLDKGSWLLGNINQTGYFRVNYDLRNWRLLIDQLIRNHEVLSVSNRAGLIDDAFSLARAGYLPQNIPLEIIRYLSEEKDFLPWHAASRALYPLDKLLDRMENYNIFNEYILKQVATTYIKLGWPKNNFNGSLVQASYQHEELRREVIMLACSFGNKHCHQQASTLISDWISSNRNRIPLNVRDIVYCTGVSLLDEDVWEFIWMKFHSTTAVSEKKILLEALTCSDDRNLLNRLLNLSLNSEVVLDQDAIDVIIHVARNPHGRDLAWKFFRDKWKILNTRYGEALFMNSKLISGVTEFLNTEGELKELKNFMKNYDGVAAASFSRAVETVEANVRWKMLYQDELFQWLGKALRH

SEQ ID NO: 479 - DNA, 7979 bp, Homo Sapiens
agcccagcctcgggggccagccccctccgcccaccgcacacgggctggccatgcggcggctctgaacgatgtcctcctcctcctacgccaagaacgggaccgcggacgggccgcactcccccacctcgcaggtggcccgaggcaccacaacccggaggagcaggttgaaaagatccgatggcagcaccacttcgaccagcttcatcctcagacagggttcagcggattcctacacaagcaggccgtctgactccgatgtctctttggaagaggaccgggaagcaattcgacaggagagagaacagcaagcagctatccagcttgagagagcaaagtccaaacctgtagcatttgccgtgaagacaaatgtgagctactgcggcgccctggacgaggatgtgcctgttccaagcacagctatctcctttgatgctaaagactttctacatattaaagagaaatataacaatgattggtggataggaaggctggtgaaagagggctgtgaaattggcttcattccaagtccactcagattggagaacatacggatccagcaagaacaaaaaagaggacgttttcacggagggaaatcaagtggaaattcttcttcaagtcttggagaaatggtatctgggacattccgagcaactcccacatcaacagcaaaacagaagcaaaaagtgacggagcacattcctccttacgatgttgtaccgtcaatgcgtccggtggtgttagtggggccgtcactgaaaggttacgaggtaacagacatgatgcagaaagccctctttgatttcctgaagcacaggtttgatgggaggatttcaataacgagagtgacagctgacatttctcttgctaagaggtctgtcctaaataatcccagcaagagagcaataattgaacgttcgaacacccggtccagcttagcggaagtacaaagtgaaattgaaagaatctttgagttggcaagatctttgcaactggttgttcttgatgcagacaccatcaatcacccagcacaacttataaagacttccttagcaccaattattgttcatgtaaaagtctcatctccaaaggttttacagcggttgattaaatctagaggaaagtcacaaagtaaacacttgaatgttcaactggtggcagctgataaacttgcacaatgccccccagaaatgtttgatgttatattggatgaaaatcagcttgaggatgcatgtgaacatctaggggagtacctggaggcgtactggcgtgccacccacacaaccagtagcacacccatgaccccgctgctgggaaggaatttgggctccacggcactctcaccatatcccacagcaatttctgggttacagagtcagcgaatgaggcacagcaaccactccacagagaactctccaattgaaagacgaagtctaatgacctctgatgaaaattatcacaatgaaagggctcggaagagtaggaaccgcttgtcttccagttctcagcatagccgagatcattaccctcttgtggaagaagattaccctgactcataccaggacacttacaaaccccataggaaccgaggatcacctgggggatatagccatgactcccgacataggctttgagtctaatgaaacaaaaaatattcatctgttgacaatttgccatagcagtgctaggataaaccaatcatcttaacttggctaacatagcacagtatttactgtgctaatgggctgctgtcattttatgctaagtaaggggcaaaaaaaaaaattacattatgcccttgagtctagatggatattagatgcccgatcatatagatatttttaagtgcaacatttacatgataacagtacattttgttttcttcatagatttagacacatcaatttgtaatttagggtacttacaaggcacatataaaataatttcccatgctggaaattccaaatgaccagttccagttggaaccaatttataaaccaattcctgttggaatttgggtgaattgactagaaagtctacttgagcatgttgtaatcaactgaaaaatctggggggaaaaaaaaaaaactaataagaaaatcgaaataccaatagaagccaaatccagctttggtatttatttgctggaagctaaatttacacttaaagttggagtgtataaacattttaatatatgttaatgttgccagaatgacttttcagacttaccaaatgtattgatagtgccaaaaaaaaaatctcagaaatcttaatgcagaaattatatagtctcctcagattttaatatttttatttctttcctggcacagctgttgtattcaaagtgttttgctttttgtttggtcagtactgttagctcatttgaagttggcaaaaacaaatacaaacaagcaaaaaacctcaaatttttttcagcagtgagagagaatagtaaagagaggcccaagcatagctggttatgtgaaatataaaatggggtgttgttctccctttaatcaatctgagcacaactacatacatccaggaatctgaagtcagatagtaaggatgtggtaccaatcctcccgagtgcaatgctaaacacttccaggtgggaattcatctatttcacttaacacaaacgcagggtctgtatttcctgccaacaagattgagtatctttccattgcttctctcagtctctgtctttgaatatctgaatgttctggcccttcaacaaattctttaaatcatgctaaggaatttcgttttatgtggacacactcaactttgatattcaggagatgtttttacaaaatgactaattgaaaaaagttgaaacaaatgattttaaaagcttgcagtaaaaaataaactcatagattcagcaaatatttgttgactaaaattatagcatttttaatgcagaaaattataaagaatttggagattgagctgccttatttctaatgaacactcctcttcatcttattaagtcttcacagtttttccagtggctataattatggaattggtgacctatgttttatattatcaaggaagccttagattcactctgatctaagaaattattgaaattgaccctttttacacaaatgtctttaaaaaaaaaaacttatttctaaatgtccatagtgcatgcattttctaaaaccccaataagtccagccataaaagttcttttctgctagtacatgtcatgaagcctatttttgaaaataatgataattaattttatagtatcttcttttctccccaagcctttcagtattcaggcactcaaagcatgcaccagttcagtaatcttcttgaccatggaaataagttccacattactgatgagttatatatatatcttgaaccccattacaacctcaccacatccccctgcatttatgttcagtgtttgtaccccattatgaacctgtttagctgataatgaggatacctataattctgtaagtcatttcaaatatttgatacaattaaaaaatatgggcttagtaaattttaaaagttaacatgtgatactggcttgtgagattcttctgtcatctagtgaagcttataaaactttcagttaagacattttaaaagagttatatccattaggcactttaataaacatataacctgccattactgaatactttgttagaacacagaagagcatcttccagcaaacaaaaatatatttattacatgtacagcacatacttgcatgagaaagaaaacattagccaaaacatttttctatatgctttactggtttcttgtttatgcgcattaaagtatttaattgcaaagagtgcaccaaggtgtacaaatttagactagacagctgttcagctttttctgtagtagcattagcagtttggtcatttaactactttaagatacttacattttatggcaggtagctgtaacagcatttaaatatatttcctagtcatcaagattaccatcttctttcaactttttaaaagtcacttgtttttaaaggtttttcaaagccttgtttttagtcttccatgtcatgccgataaagagagtctcattcaatatctgtgcacaaaaccaatctatcaattaccatcagatgtccatacctgttttgctttgcattcttattcaaaagctgacaatcttggaaagggtataatgtatattttattgatggatatatttaaatgtttactttaatttggaatattctttccccttctttctgtaataagtttatcttcctcaaataaggggatatacatcttattttttttaaagacttaagagtttattgtgtaaatgatacttaaaatctagatatatactaaatgaaaagttttatttttgccaagcacaccaagcacctttgaaaaatacatactccatactttgtttttaattaatttcatttaaagatagcaaatgattataagcaagagaaacaagtcttttactgttttgaggctgttttaacttacagtataagccacatactagaattctgtaatttcagtcacagacatataataatgtggactcatgtgacaatgtggaaatgtagttctggaaaaaaacgaatgcaatttgtcaatcctgatgttaattctcaagggtataatgtcactctaatattataaccaacaacattatcttgtttaatatttaaagcaacacttagaaatgtttataaatgatgattctctcttatctttatacagttctattggagagaaggttgaaattgttcacaatttagatgatggtctttcctaataagagtcttaattttgtgactatataagtcattgcagttagtctttaatgaaatgaattttattaatgtaaaacaaattctgagacaattatttgtttcctttaaataatctgctatttaattattattgtcgttgtttgcaaaatgtatttttggaatgttaacctcttttcatacctgcatacttgaacttgtcttttgtgtgggggccttaaaattcataataggaagtggaggcagtgaaaggaagtaagaaaaggaaattatgctaaaagatggtttgcaaatttaaattctttaaatgaacatatcacaaaatgttgttaagacccaggatgtccgttaagaatgtgtcttggcaaccttaatttgcatgttagtatatattttcttagttacacagttttattttggtatttgcttaaaaaatgtaataccattgtagaaattaccctatgtactgatatatttactacctcttctctagagaagacaatctgtctttaaagggaaaaacactggtcaataagtagtgatcaaaattatcactattctggctaaccttgctgcaaagctaaatacatagattattaaaatatgccttccctttagattttaaactgtttccaaaatgctgtttggcaccctttcatttcttccacgttagtgaagttttctttgaattggttcacagtttatcatgaggcaaggttaatttaacaaataagtcatcatagggaacaaaacaaactgcaagggaattgcctttgtgtgcaacttgttataatatctagttctaagtctaaaggagtaaaagtccaaagactttatgtttaagagcagctggtttgcaaattcacattttgttggtccttgacttccacagagcatgacttagccatttactgggtaaggatatgcataatcttggactcccatgtaattggaataaacttcatatcaatgtttcaaataaatgctatgtaccccttattccttttacatttctgcctttgtcttttatgacaatgttgcatgttgtgtttttttaaattatataaaactcatccttgaatgactgtatgaatgaaaaatttataggaaattatgtaataaaatctgttttattagtttctcatacctttaaatactgtcaatactataactgttagtaagttacttactcaagctgtgtctatggggcagagaacagtcctcttctttaaaataatcatgatcaaaccagtcaagtcaatccaattagctgttagacagacaataaggataaccttctttttgacttaagcagtcaagttagtcaaaatagaaaaattggcttatatgggcacccagaactacagcattcaaaaattacttttaaaagtttcttcttttattaaaatggactttcttaaataaaatacatcctctgatagcagctatctctttttacttgtaatgattaattctaaatgcttcatgtaattgagggacattatgagaagactagaaagtatctcatcagataatcctaagggctgtaacttctacttgccataaacaaagtataattaagagtgagtagcaattggtttggggagtcgtagttatatatgaaactttcttttgtttctcatgatgtatgtaaaatgtttgcagaaggatggtagaaaatgttactaatgaatttagagtggtttgggagaatacactgatacttcctcatttgaaaattataaggagttacaaggggaactaagaaccagaagtggctggcctctagcttttcaatacctgataagtgttcttggttatgttttgaacacttaaatttctcaacaaatggctatgtctatatttatgtaggggccacccttgccctacttgcatgccactttgacttttaactgaaatcagtgtgaattctgtatgcataagggatgtaataaagaggcgggatcattaacgctatatcgttgcatactatttttcatatgccttacaatattttctgggatgttattaaaatgaaagcattttattgccaaaataaatctatgttgttacttataatctgcattagcagtagaaaaataatgtagcaaaaacatattgtacagtacaaaattataaaatatatattttgccaataatataaaaatagattgaggagaaagaagcacatttgttatagcacaaacttataacaaaatccaccgttaaatttggcagtcatattttttaaaagtatgtcgatttagttctaagttttgtcagatttacttcatctaccatctttttaacttgctgcttgatacttttccagcaatttatttcatagccttgcaatctgtggatgtaatttcttttgttttattcccttccataaaatttattaaattttattttgtgataacactcataccatattttctcctcttatttcttctctttcaataacaacagcagaaagtcacagcaagtgagctcatagggctcctctgaattttggacatgtgtgagatttttgtatttttcacagcctcgagtcagaatgatcaataaagatgtcccaaccacaaaaaattatattagttagggattctttaatttgttttgtactgaatactactttgaaacataagttaaagccattagctgtgtttttgtagggatggtgggaaggaataaaaaataaatgtattaacataaaacatactaaaacagaaatatggcaaaatgatgtaaaaagatttttcctactattctgagggctgttgaaatcccaggctattgctatatctccattgacaaagtgggataaaaaatgcctttgtcaaataattttttttctttctttaaattttagttatttattttaataatttgtccccttttatttttcttatctaggtatgtgtagcattctacaaggcatgctgggtaaaatatactatgcaaatgtgtacagtgctgcatgttttgttctccctctgctttagtggctttaaagaaaaaaacgtggtgttatttttgtgaataaaaacattaacaaagaaaatgcagagtgcatgcatagagtatcctcatttctatggatttgttttatggaatttaaatgtgtacaaaacaactgcattactttttttcttttatataataaatgaaaaaaacactgaaa

SEQ ID NO: 480 - protein, 520 aa, Homo Sapiens
MSSSSYAKNGTADGPHSPTSQVARGTTTRRSRLKRSDGSTTSTSFILRQGSADSYTSRPSDSDVSLEEDREAIRQEREQQAAIQLERAKSKPVAFAVKTNVSYCGALDEDVPVPSTAISFDAKDFLHIKEKYNNDWWIGRLVKEGCEIGFIPSPLRLENIRIQQEQKRGRFHGGKSSGNSSSSLGEMVSGTFRATPTSTAKQKQKVTEHIPPYDVVPSMRPVVLVGPSLKGYEVTDMMQKALFDFLKHRFDGRISITRVTADISLAKRSVLNNPSKRAIIERSNTRSSLAEVQSEIERIFELARSLQLVVLDADTINHPAQLIKTSLAPIIVHVKVSSPKVLQRLIKSRGKSQSKHLNVQLVAADKLAQCPPEMFDVILDENQLEDACEHLGEYLEAYWRATHTTSSTPMTPLLGRNLGSTALSPYPTAISGLQSQRMRHSNHSTENSPIERRSLMTSDENYHNERARKSRNRLSSSSQHSRDHYPLVEEDYPDSYQDTYKPHRNRGSPGGYSHDSRHRL

SEQ ID NO: 481 - DNA, 2594 bp, Homo Sapiens
gccctaaccttcccagggctcagctctttggagctgcccattcctccggctgcgagaaaggacgcgcgccctgcgtcgggcgaagaaaagaagcaaaacttgtcgggagggtttcgtcatcaacctccttcccgcaaacctaaacctcctgccggggccatccctagacagaggaaagttcctgcagagccgaccagccctagtggatctggggcaggcagcggcgctggctgtggaattagatctgttttgaacccagtggagcgcatcgctggggctcggaagtcaccgtccgcgggcaccgggttggcgctgcccgagtggaaccgacagtttgcgagcctcggctgcaagtggcctctcctccccgcggttgttgttcagtgtcgggtgagggctgcgagtgtggcaagttgcaaagagagcctcagaggtccgaagagcgctgcgctcctactcgcgttcgcttcttcctcttctcggttccctactgtgaaatcgcagcgacatttacaaaggcctccgggtcctaccgagaccgatccgcagcgtttggcccggtcgtgcctattgcatcgggagcccccgagcaccggcgaaggactggcgggtggggtagggaggtggcggcggcggcatggcgaggttcccgaaggccgacctggccgctgcaggagttatgttactttgccacttcttcacggaccagtttcagttcgccgatgggaaacccggagaccaaatccttgattggcagtatggagttactcaggccttccctcacacagaggaggaggtggaagttgattcacacgcgtacagccacaggtggaaaagaaacttggactttctcaaggcggtagacacgaaccgagcaagcgtcggccaagactctcctgagcccagaagcttcacagacctgctgctggatgatgggcaggacaataacactcagatcgaggaggatacagaccacaattactatatatctcgaatatatggtccatctgattctgccagccgggatttatgggtgaacatagaccaaatggaaaaagataaagtgaagattcatggaatattgtccaatactcatcggcaagctgcaagagtgaatctgtccttcgattttccattttatggccacttcctacgtgaaatcactgtggcaaccgggggtttcatatacactggagaagtcgtacatcgaatgctaacagccacacagtacatagcacctttaatggcaaatttcgatcccagtgtatccagaaattcaactgtcagatattttgataatggcacagcacttgtggtccagtgggaccatgtacatctccaggataattataacctgggaagcttcacattccaggcaaccctgctcatggatggacgaatcatctttggatacaaagaaattcctgtcttggtcacacagataagttcaaccaatcatccagtgaaagtcggactgtccgatgcatttgtcgttgtccacaggatccaacaaattcccaatgttcgaagaagaacaatttatgaataccaccgagtagagctacaaatgtcaaaaattaccaacatttcggctgtggagatgaccccattacccacatgcctccagtttaacagatgtggcccctgtgtatcttctcagattggcttcaactgcagttggtgtagtaaacttcaaagatgttccagtggatttgatcgtcatcggcaggactgggtggacagtggatgccctgaagagtcaaaagagaagatgtgtgagaatacagaaccagtggaaacttcttctcgaaccaccacaaccgtaggagcgacaaccacccagttcagggtcctaactaccaccagaagagcagtgacttctcagtttcccaccagcctccctacagaagatgataccaagatagcactacatctaaaagataatggagcttctacagatgacagtgcagctgagaagaaagggggaaccctccacgctggcctcatcattggaatcctcatcctggtcctcattgtagccacagccattcttgtgacagtctatatgtatcaccacccaacatcagcagccagcatcttctttattgagagacgcccaagcagatggcctgcgatgaagtttagaagaggctctggacatcctgcctatgctgaagttgaaccagttggagagaaagaaggctttattgtatcagagcagtgctaaaatttctaggacagaacaacaccagtactggtttacaggtgttaagactaaaattttgcctatacctttaagacaaacaaacaaacacacacacaaacaagctctaagctgctgtagcctgaagaagacaagatttctggacaagctcagcccaggaaacaaagggtaaacaaaaaactaaaacttatacaagataccatttacactgaacatagaattccctagtggaatgtcatctatagttcactcggaacatctcccgtggacttatctgaagtatgacaagattataatgcttttggcttaggtgcagggttgcaaagggatcagaaaaaaaaaatcataataaagctttagttcatgaggg

SEQ ID NO: 482 - protein, 529 aa, Homo Sapiens
MARFPKADLAAAGVMLLCHFFTDQFQFADGKPGDQILDWQYGVTQAFPHTEEEVEVDSHAYSHRWKRNLDFLKAVDTNRASVGQDSPEPRSFTDLLLDDGQDNNTQIEEDTDHNYYISRIYGPSDSASRDLWVNIDQMEKDKVKIHGILSNTHRQAARVNLSFDFPFYGHFLREITVATGGFIYTGEVVHRMLTATQYIAPLMANFDPSVSRNSTVRYFDNGTALVVQWDHVHLQDNYNLGSFTFQATLLMDGRIIFGYKEIPVLVTQISSTNHPVKVGLSDAFVVVHRIQQIPNVRRRTIYEYHRVELQMSKITNISAVEMTPLPTCLQFNRCGPCVSSQIGFNCSWCSKLQRCSSGFDRHRQDWVDSGCPEESKEKMCENTEPVETSSRTTTTVGATTTQFRVLTTTRRAVTSQFPTSLPTEDDTKIALHLKDNGASTDDSAAEKKGGTLHAGLIIGILILVLIVATAILVTVYMYHHPTSAASIFFIERRPSRWPAMKFRRGSGHPAYAEVEPVGEKEGFIVSEQC

SEQ ID NO: 483 - DNA, 5275 bp, Homo Sapiens
gagggcggggcgcaggcgcggttagtaccgcggtgggcgccggggctcccgggaatctaccttctcctgcggccggcacgcggttcccagggggccagcggcggtcagccgaggtcgagacgcccgcagggtggccttagcggccggtcgtaccacggcagccccgccgatcaggttcctttgggagacttcgacttgttggcgaaatgaaccggagaagaatcccaattgggaattgcggaaaacaggactctagggtagagaaaggttgtagaaccaatagggtttgagacctgatggccaaaagaaaggaagaaaatttttcctctcctaaaaatgccaaaaggccaagacaagaagaattggaggattttgataaagatggtgacgaagacgaatgtaaaggtactactttgactgcagcagaagttggaataattgagagtattcacctaaaaaacttcatgtgtcattcaatgcttggaccttttaagtttggttctaatgtcaactttgttgttggcaacaatggaagtgggaagagtgcagtactcacagctctcatagtcggtcttggtggaagagcagttgctactaatagaggatcctctttaaaaggttttgtgaaagatggacagaactctgcagatatctcaataacattgaggaacagaggagatgatgcctttaaagccagtgtgtatggtaactctatacttatacagcaacacatcagcatagatggaagtcgatcttataaacttaaaagtgcaacaggctccgtggtttccacgaggaaagaagagctgattgcaattcttgatcattttaacatccaggtggataatccagtttctgttttaacacaagaaatgagcaagcagttcttacagtctaaaaatgaaggagacaaatacaaattcttcatgaaagcaacgcaacttgaacagatgaaggaagattattcatacattatggaaacgaaagaaagaacaaaggagcagatacatcaaggagaagagcggcttactgaactaaagcgccagtgtgtagagaaagaggaacgttttcaaagtattgctggtttaagtacaatgaagactaatttagagtccttgaaacatgaaatggcttgggcagtggtcaatgaaattgaaaaacaattgaatgccatcagagataatatcaaaattggagaagatcgtgctgctagacttgacaggaaaatggaagaacagcaggtcagacttaatgaggcagaacaaaagtacaaggatattcaagacaaactagaaaagattagtgaagagacaaatgcacgagcaccagaatgtatggcattgaaagcagatgttgttgctaagaaaagggcctataatgaagctgaggttttatataaccgatccttaaacgaatataaagcattaaagaaagatgatgagcagctttgtaaacgaattgaagagctgaaaaaaagtactgaccaatctttggaacctgaacggttggaaagacaaaaaaaaatatcttggttaaaagagagagtaaaggcctttcaaaatcaagaaaattcagtcaatcaagagatcgaacagtttcagcaagccatagaaaaggacaaagaagaacatggcaaaattaagagagaagaattagatgtgaagcatgcactgagctacaatcagaggcaactgaaagaattgaaagatagtaaaactgatcgactcaaaagatttggccctaatgttccagctcttcttgaagccatagatgatgcttatagacaaggacattttacctataaacctgtaggccctttaggagcttgcattcatcttcgggacccagaacttgctttggctattgaatcttgcttaaaagggcttctgcaggcctattgttgccataatcatgctgatgaaagggtccttcaggcactcatgaaaaggttttatttaccagggacctcacggccaccgataatagtttctgagtttcggaatgagatatatgatgtaagacacagagctgcttatcatccagactttccaacagttctgacagctttagaaatagataatgcggttgtggcaaatagcctaattgacatgagaggcatagagacagtgctactaatcaaaaataattctgtagctcgtgcagtaatgcagtcccaaaagccacccaaaaattgtagagaagcttttactgctgatggtgatcaagtttttgcaggacgttattattcatctgaaaatacaagacctaagttcctaagcagagatgtggattctgaaataagtgacttggagaatgaggttgaaaataagacggcccagatattaaatcttcagcaacatttatctgcccttgaaaaagatattaaacacaatgaggaacttcttaaaaggtgccaactacattataaagaactaaagatgaaaataagaaaaaatatttctgaaattcgggaacttgagaacatagaagaacaccagtctgtagatattgcaactttggaagatgaagctcaggaaaataaaagcaaaatgaaaatggttgaggaacatatggagcaacaaaaagaaaatatggagcatcttaaaagtctgaaaatagaagcagaaaataagtatgatgcaattaaattcaaaattaatcaactatcggagctagcagacccacttaaggatgaattaaaccttgctgattctgaagtggataaccaaaaacgagggaaacgacattatgaagaaaaacaaaaagaacacttggataccttaaataaaaagaaacgagaactggatatgaaagagaaagaactagaggagaaaatgtcacaagcaagacaaatctgcccagagcgtatagaagtagaaaaatctgcatcaattctggacaaagaaattaatcgattaaggcagaagatacaggcagaacatgctagtcatggagatcgagaggaaataatgaggcagtaccaagaagcaagagagacctatcttgatctggatagtaaagtgaggactttaaaaaagtttattaaattactgggagaaatcatggagcacagattcaagacatatcaacaatttagaaggtgtttgactttacgatgcaaattatactttgacaacttactatctcagcgggcctattgtggaaaaatgaattttgaccacaagaatgaaactctaagtatatcagttcagcctggagaaggaaataaagctgctttcaatgacatgagagccttgtctggaggtgaacgttctttctccacagtgtgttttattctttccctgtggtccatcgcagaatctcctttcagatgcctggatgaatttgatgtctacatggatatggttaataggagaattgccatggacttgatactgaagatggcagattcccagcgttttagacagtttatcttgctcacacctcaaagcatgagttcacttccatccagtaaactgataagaattctccgaatgtctgatcctgaaagaggacaaactacattgcctttcagacctgtgactcaagaagaagatgatgaccaaaggtgatttgtaacttaacatgccttgtcctgatgttgaaggatttgtgaagggaaaaaaaattctggactctttgatataataaaatgagactggaggcattctgaaatgaaagaaactcctttatatatccaaccacaatcaaacatataaataagcctggaaaaccaactacaacctgcaatttaagattactattactttaagaaaatcaatttcatagtattggttttaaatctttttaagtttttttaatacgatctatttttataggttctttttcagaagtaaaattttgtacatatatacatgtacatatctgtttagtttgggttcatttctataacattttgtaagaaaataaaagtttgagcacctgattatatttagttttgcttttccagatattacattctatagttaccaaaaatggttgaagggagggatttctcattgcagagggtggggtgcaagggaataagacacttgtacggaacactgaagctttgccaacttctacacatgccttttttgcagtcctttaactgtccaccctaccaagagcttataaccagtatcagaactggataatgacgcagtttttcactctgacctccatcatgcttgcctgatttaaaagccctcagtttgcagtccagggactgttcaggcttgtcctcagctgagaggacacaggctagagggactgtgcagaaccaggctgggagaagggctgggaaaactgggagtggagggtggatcctcatggagcaggagagtagctcatggctccaggagcctgaggccatgcagttgatggtgagctgacatcaattctaagactcatcctaattgaggggtgttaaaaagtgtgctgcttagaatgaccaaatatagttattgtaaaaaatgatatttatgaactttttattttagaaaacatgaattttattgctccctgtattatttgtttgatactaggattcatgctaaactttttaagaatgtattggatatcaagaagcattccttacattagtagcaataaatattagaataaatatgaaattgaactattttcagaaaaagggcagtatattaagagcagggactgttctctagttattgaggaaaactggactttgtttgtgtttttggtggaggaagaagtttaagatactttagtcttaaattgaggtttgccaaatgagaagttcaaaaacttgggctttctaatcagaatttccaggaggaggaaagtgtgtgctgaatattttaaacatttcccactgatcatacaaagtctgatttttaaatttacacttataatgcctttgtattaaaattatttttaacatgtgcttttccaaattaaaaatgaagtagagtataccaaatgcataaactttcattagctaaggaactcatgtctgaattttgttgtagttttgaatgttgtgctctttcatacagaatgggaaacataatcctcaggtatcccagcatctcttgttgaattgaagattattcattgctttggcctcacaaagttttgatttcaactatcataagtgaaaatatcttcctttaatgttctaagtagtgataatattactagaatgaaagaataaaaagaaattgttcttttaaaatatgtgtaacttctaaaaataaaacttaaaatttatatgtaaaaaaaaaaaaaaaaa

SEQ ID NO: 484 - protein, 1091 aa, Homo Sapiens
MAKRKEENFSSPKNAKRPRQEELEDFDKDGDEDECKGTTLTAAEVGIIESIHLKNFMCHSMLGPFKFGSNVNFVVGNNGSGKSAVLTALIVGLGGRAVATNRGSSLKGFVKDGQNSADISITLRNRGDDAFKASVYGNSILIQQHISIDGSRSYKLKSATGSVVSTRKEELIAILDHFNIQVDNPVSVLTQEMSKQFLQSKNEGDKYKFFMKATQLEQMKEDYSYIMETKERTKEQIHQGEERLTELKRQCVEKEERFQSIAGLSTMKTNLESLKHEMAWAVVNEIEKQLNAIRDNIKIGEDRAARLDRKMEEQQVRLNEAEQKYKDIQDKLEKISEETNARAPECMALKADVVAKKRAYNEAEVLYNRSLNEYKALKKDDEQLCKRIEELKKSTDQSLEPERLERQKKISWLKERVKAFQNQENSVNQEIEQFQQAIEKDKEEHGKIKREELDVKHALSYNQRQLKELKDSKTDRLKRFGPNVPALLEAIDDAYRQGHFTYKPVGPLGACIHLRDPELALAIESCLKGLLQAYCCHNHADERVLQALMKRFYLPGTSRPPIIVSEFRNEIYDVRHRAAYHPDFPTVLTALEIDNAVVANSLIDMRGIETVLLIKNNSVARAVMQSQKPPKNCREAFTADGDQVFAGRYYSSENTRPKFLSRDVDSEISDLENEVENKTAQILNLQQHLSALEKDIKHNEELLKRCQLHYKELKMKIRKNISEIRELENIEEHQSVDIATLEDEAQENKSKMKMVEEHMEQQKENMEHLKSLKIEAENKYDAIKFKINQLSELADPLKDELNLADSEVDNQKRGKRHYEEKQKEHLDTLNKKKRELDMKEKELEEKMSQARQICPERIEVEKSASILDKEINRLRQKIQAEHASHGDREEIMRQYQEARETYLDLDSKVRTLKKFIKLLGEIMEHRFKTYQQFRRCLTLRCKLYFDNLLSQRAYCGKMNFDHKNETLSISVQPGEGNKAAFNDMRALSGGERSFSTVCFILSLWSIAESPFRCLDEFDVYMDMVNRRIAMDLILKMADSQRFRQFILLTPQSMSSLPSSKLIRILRMSDPERGQTTLPFRPVTQEEDDDQR

SEQ ID NO: 485 - DNA, 2533 bp, Homo Sapiens
attcttctattagataacagtagctatttaaatacttctgcagaagctcacatatttttagtttgttgaagttcgtgactgcttcactctctcattcttagcttgaatttggaaatgacttttgatgacctaaagatccagactgtgaaggaccagcctgatgagaagtcaaatggaaaaaaagctaaaggtcttcagtttctttactctccatggtggtgcctggctgctgcgactctaggggtcctttgcctgggattagtagtgaccattatggtgctgggcatgcaattatcccaggtgtctgacctcctaacacaagagcaagcaaacctaactcaccagaaaaagaaactggagggacagatctcagcccggcaacaagcagaagaagcttcacaggagtcagaaaacgaactcaaggaaatgatagaaacccttgctcggaagctgaatgagaaatccaaagagcaaatggaacttcaccaccagaatctgaatctccaagaaacactgaagagagtagcaaattgttcagctccttgtccgcaagactggatctggcatggagaaaactgttacctattttcctcgggctcatttaactgggaaaagagccaagagaagtgcttgtctttggatgccaagttgctgaaaattaatagcacagctgatctggacttcatccagcaagcaatttcctattccagttttccattctggatggggctgtctcggaggaaccccagctacccatggctctgggaggacggttctcctttgatgccccacttatttagagtccgaggcgctgtctcccagacatacccttcaggtacctgtgcatatatacaacgaggagctgtttatgcggaaaactgcattttagctgccttcagtatatgtcagaagaaggcaaacctaagagcacagtgaatttgaaggctctggaagaaaagaaaaaagtctttgagttttattctggaatttaagctattctttgtcacttgggtgccaaacatgagagcccagaaaactgtcatttagctggctgcagaactcctttgcagaaactggggttccaggtgcctggcacctttatgtcaacatttttgattctagctacctgtattatttcacctagcttgtcccaagcttccctgccagcctgaagtccattttcccctttttattttaaaatttgactcctcttcaagcttgaaaaccctctgaactcagtcttctttacctcattatcaccttcccctcacactcctaaaattgcatgaaagacagaacatggagaacttgctcaagtgcaggcagagagcaaaaaggggaaatatgtctgggaaaaagtgcacgtgaagaaacaaagaaggacagaggccattccgaaatcaagaaactcatgttcttaactttaaaaaaggtatcaatccttggtttttaaactgtggtccatctccagactctaccacttacggacagacagacagacagacacacacacacacacacacacacattttgggacaagtggggagcccaagaaagtaattagtaagtgagtggtcttttctgtaagctaatccacaacctgttaccacttcctgaatcagttattatttcttcatttttttttctaccagaggacagattaatagatttaacccttcacaacagttcttgttagaatcatgggatgtgtggcccagaggtaagaatagaatttctttccctaaagaacataccttttgtagatgaactcttctcaactctgttttgctatgctataattccgaaacatacaagacaaaaaaaatgaagacactcaatctagaacaaactaagccaggtatgcaaatatcgctgaatagaaacagatggaattagaaatatatcttctatttttaggcttctatttcctttccacccactcttcacaggctattctactttaaaggaagcctttttattttgctgcacacaatctagcaggaatctttttttttttttaagagctgtgtcatccttatgtaggcaagagatgtttgcttttgttaaaagctttattgagatataattaacataaaataaactgaacatatttaaagtgtactatttgataagttttcacaccttgtggagaacatgcatactacaattaagagagtgaacatatccatcatccctcaaagtgtcacaatgctcctcctgatgactcctccccagaaaaccaccaatcggctttcattttgcattttgtagttttatgtgaatggaatcatatagtatgtcttttttttttgtctggcttctttcactttgcataattattttgagattcatatgtctccatcttgatgctcgtatgaattcattcttttaaatgttgaatattcccttgtatggatataccacaattcatttacccatttacttgttgatgacatttgggttgttttagttttgggatattacaaataaagctgctgtgaacatttgtgtacaagaaaaaaaaaaaaaaaaa

SEQ ID NO: 486 - protein, 273 aa, Homo Sapiens
MTFDDLKIQTVKDQPDEKSNGKKAKGLQFLYSPWWCLAAATLGVLCLGLVVTIMVLGMQLSQVSDLLTQEQANLTHQKKKLEGQISARQQAEEASQESENELKEMIETLARKLNEKSKEQMELHHQNLNLQETLKRVANCSAPCPQDWIWHGENCYLFSSGSFNWEKSQEKCLSLDAKLLKINSTADLDFIQQAISYSSFPFWMGLSRRNPSYPWLWEDGSPLMPHLFRVRGAVSQTYPSGTCAYIQRGAVYAENCILAAFSICQKKANLRAQ

SEQ ID NO: 487 - DNA, 3198 bp, Homo Sapiens
aggagcacagctgtgtttggctgcagggccaagagcgctgtcaagaagacccacacgcccccctccagcagctgaattcctgcagctcagcagccgccgccagagcaggacgaaccgccaatcgcaaggcacctctgagaacttcaggatgcagatgtctccagccctcacctgcctagtcctgggcctggcccttgtctttggtgaagggtctgctgtgcaccatcccccatcctacgtggcccacctggcctcagacttcggggtgagggtgtttcagcaggtggcgcaggcctccaaggaccgcaacgtggttttctcaccctatggggtggcctcggtgttggccatgctccagctgacaacaggaggagaaacccagcagcagattcaagcagctatgggattcaagattgatgacaagggcatggcccccgccctccggcatctgtacaaggagctcatggggccatggaacaaggatgagatcagcaccacagacgcgatcttcgtccagcgggatctgaagctggtccagggcttcatgccccacttcttcaggctgttccggagcacggtcaagcaagtggacttttcagaggtggagagagccagattcatcatcaatgactgggtgaagacacacacaaaaggtatgatcagcaacttgcttgggaaaggagccgtggaccagctgacacggctggtgctggtgaatgccctctacttcaacggccagtggaagactcccttccccgactccagcacccaccgccgcctcttccacaaatcagacggcagcactgtctctgtgcccatgatggctcagaccaacaagttcaactatactgagttcaccacgcccgatggccattactacgacatcctggaactgccctaccacggggacaccctcagcatgttcattgctgccccttatgaaaaagaggtgcctctctctgccctcaccaacattctgagtgcccagctcatcagccactggaaaggcaacatgaccaggctgccccgcctcctggttctgcccaagttctccctggagactgaagtcgacctcaggaagcccctagagaacctgggaatgaccgacatgttcagacagtttcaggctgacttcacgagtctttcagaccaagagcctctccacgtcgcgcaggcgctgcagaaagtgaagatcgaggtgaacgagagtggcacggtggcctcctcatccacagctgtcatagtctcagcccgcatggcccccgaggagatcatcatggacagacccttcctctttgtggtccggcacaaccccacaggaacagtccttttcatgggccaagtgatggaaccctgaccctggggaaagacgccttcatctgggacaaaactggagatgcatcgggaaagaagaaactccgaagaaaagaattttagtgttaatgactctttctgaaggaagagaagacatttgccttttgttaaaagatggtaaaccagatctgtctccaagaccttggcctctccttggaggacctttaggtcaaactccctagtctccacctgagaccctgggagagaagtttgaagcacaactcccttaaggtctccaaaccagacggtgacgcctgcgggaccatctggggcacctgcttccacccgtctctctgcccactcgggtctgcagacctggttcccactgaggccctttgcaggatggaactacggggcttacaggagcttttgtgtgcctggtagaaactatttctgttccagtcacattgccatcactcttgtactgcctgccaccgcggaggaggctggtgacaggccaaaggccagtggaagaaacaccctttcatctcagagtccactgtggcactggccacccctccccagtacaggggtgctgcaggtggcagagtgaatgtcccccatcatgtggcccaactctcctggcctggccatctccctccccagaaacagtgtgcatgggttattttggagtgtaggtgacttgtttactcattgaagcagatttctgcttccttttatttttataggaatagaggaagaaatgtcagatgcgtgcccagctcttcaccccccaatctcttggtggggaggggtgtacctaaatatttatcatatccttgcccttgagtgcttgttagagagaaagagaactactaaggaaaataatattatttaaactcgctcctagtgtttctttgtggtctgtgtcaccgtatctcaggaagtccagccacttgactggcacacacccctccggacatccagcgtgacggagcccacactgccaccttgtggccgcctgagaccctcgcgccccccgcgcccctctttttccccttgatggaaattgaccatacaatttcatcctccttcaggggatcaaaaggacggagtggggggacagagactcagatgaggacagagtggtttccaatgtgttcaatagatttaggagcagaaatgcaaggggctgcatgacctaccaggacagaactttccccaattacagggtgactcacagccgcattggtgactcacttcaatgtgtcatttccggctgctgtgtgtgagcagtggacacgtgaggggggggtgggtgagagagacaggcagctcggattcaactaccttagataatatttctgaaaacctaccagccagagggtagggcacaaagatggatgtaatgcactttgggaggccaaggcgggaggattgcttgagcccaggagttcaagaccagcctgggcaacataccaagacccccgtctctttaaaaatatatatattttaaatatacttaaatatatatttctaatatctttaaatatatatatatattttaaagaccaatttatgggagaattgcacacagatgtgaaatgaatgtaatctaatagaagcctaatcagcccaccatgttctccactgaaaaatcctctttctttggggtttttctttctttcttttttgattttgcactggacggtgacgtcagccatgtacaggatccacaggggtggtgtcaaatgctattgaaattgtgttgaattgtatgctttttcacttttgataaataaacatgtaaaaatgtttcaaaaaaataataaaataaataaatacgaagaatatgtcaggacagtcaaaaaaaaaaaaaaaaaa

SEQ ID NO: 488 - protein, 402 aa, Homo Sapiens [sequence omitted]

SEQ ID NO: 489 - DNA, 2513 bp, Homo Sapiens
aaaagtcggtgcccactcgctccgcgctgccgcggcaaccagcacaccccggcacctcctctgcggcagctgcgcctcgcaagcgcagtgccgcagcgcacgccggagtggctgtagctgcccggcgcggcgccgccctgcgcgggctgtgggctgcgggctgcgcccccgctgctggccagctctgcacggctgcgggctctgcggcgcccggtgctctgcaacgctgcggcgggcggcatgggataacgcggccatggtgcgccgagatcgcctccgcaggatgagggagtggtgggtccaggtggggctgctggccgtgcccctgcttgctgcgtacctgcacatcccaccccctcagctctcccctgcccttcactcatggaagtcttcaggcaagtttttcacttacaagggactgcgtatcttctaccaagactctgtgggtgtggttggaagtccagagatagttgtgcttttacacggttttccaacatccagctacgactggtacaagatttgggaaggtctgaccttgaggtttcatcgggtgattgcccttgatttcttaggctttggcttcagtgacaaaccgagaccacatcactattccatatttgagcaggccagcatcgtggaagcgcttttgcggcatctggggctccagaaccgcaggatcaaccttctttctcatgactatggagatattgttgctcaggagcttctctacaggtacaagcagaatcgatctggtcggcttaccataaagagtctctgtctgtcaaatggaggtatctttcctgagactcaccgtccactccttctccaaaagctactcaaagatggaggtgtgctgtcacccatcctcacacgactgatgaacttctttgtattctctcgaggtctcaccccagtctttgggccgtatactcggccctctgagagtgagctgtgggacatgtgggcagggatccgcaacaatgacgggaacttagtcattgacagtctcttacagtacatcaatcagaggaagaagttcagaaggcgctgggtgggagctcttgcctctgtaactatccccattcattttatctatgggccattggatcctgtaaatccctatccagagtttttggagctgtacaggaaaacgctgccgcggtccacagtgtcgattctggatgaccacattagccactatccacagctagaggatcccatgggcttcttgaatgcatatatgggcttcatcaactccttctgagctggaaagagtagcttccctgtattacctcccctactcccttatgtgttgtgtattccacttaggaagaaatgcccaaaagaggtcctggccatcaaacataattctctcacaaagtccactttactcaaattggtgaacagtgtataggaagaagccagcaggagctctgactaaggttgacataatagtccacctcccattactttgatatctgatcaaatgtatagacttggctttgttttttgtgctattaggaaattctgatgagcattactattcactgatgcagaaagacgttcttttgcataaaagacttttttttaacactttggacttctctgaaatatttagaagtgctaatttctggcccacccccaacaggaattctatagtaaggaggaggagaaggggggctccttccctctcctcgaatgacgttatgggcacatgccttttaaaagttctttaagcaacacagagctgagtcctctttgtcatacctttggatttagtgtttcatcagctgtttttagttataaacattttgttaaaatagatattggtttaaatgatacagtattttaggtatgatttaagactatgatttacctatacattatatatattttataaagatactaaaccagcatacccttactctgccagagtagtgaagctaattaaacacatttggtttctgaataaattgaactaaatccaaactatttcctaaaatcacaggacattaaggaccaatagcatctgtgccagagatgtactgttattagctgggaagaccaattctaacagcaaataacagtctgagactcctcatacctcagtggttagaagcatgtctctcttgagctacagtagaggggaagggattgttgtgtagtcaagtcaccatgctgaatgtacactgattcctttatgatgactgcttaactccccactgcctgtcccagagaggctttccaatgtagctcagtaattcctgttactttacagacaggaaagttccagaaactttaagaacaaactctgaaagacctatgagcaaatggtgctgaatactttttttttaaagccacatttcattgtcttagtcaaagcaggattattaagtgattatttaaaattcgtttttttaaattagcaacttcaagtataacaactttgaaactggaataagtgtttattttctattaataaaaatgaattgtgacaaaagtggaaaaaaaaa

SEQ ID NO: 490 - protein, 335 aa, Homo Sapiens
MVRRDRLRRMREWWVQVGLLAVPLLAAYLHIPPPQLSPALHSWKSSGKFFTYKGLRIFYQDSVGVVGSPEIVVLLHGFPTSSYDWYKIWEGLTLRFHRVIALDFLGFGFSDKPRPHHYSIFEQASIVEALLRHLGLQNRRINLLSHDYGDIVAQELLYRYKQNRSGRLTIKSLCLSNGGIFPETHRPLLLQKLLKDGGVLSPILTRLMNFFVFSRGLTPVFGPYTRPSESELWDMWAGIRNNDGNLVIDSLLQYINQRKKFRRRWVGALASVTIPIHFIYGPLDPVNPYPEFLELYRKTLPRSTVSILDDHISHYPQLEDPMGFLNAYMGFINSF

SEQ ID NO: 491 - DNA, 6936 bp, Homo Sapiens
aggccgcgctcagcaggcggggcgggagccgcgtgcgcccgaggacccggccggaaggcttgcgccagctcaggatgaggacaggctgggcgacccctcgccgcccggcggggctcctcatgctgctcttctggttcttcgatctcgcggagccctctggccgcgcagctaatgaccccttcaccatcgtccatggaaatacgggcaagtgcatcaagccagtgtatggctggatagtagcagacgactgtgatgaaactgaggacaagttatggaagtgggtgtcccagcatcggctctttcatttgcactcccaaaagtgccttggcctcgatattaccaaatcggtaaatgagctgagaatgttcagctgtgactccagtgccatgctgtggtggaaatgtgagcaccactctctgtacggagctgcccggtaccggctggctctgaaggatggacatggcacagcaatctcaaatgcatctgatgtctggaagaaaggaggctcagaggaaagcctttgtgaccagccttatcatgagatctataccagagatgggaactcttatgggagaccttgtgaatttccattcttaattgatgggacctggcatcatgattgcattcttgatgaagatcatagtgggccatggtgtgccaccaccttaaattatgaatatgaccgaaagtggggcatctgcttaaagcctgaaaacggttgtgaagataattgggaaaagaacgagcagtttggaagttgctaccaatttaatactcagacggctctttcttggaaagaagcttatgtttcatgtcagaatcaaggagctgatttactgagcatcaacagtgctgctgaattaacttaccttaaagaaaaagaaggcattgctaagattttctggattggtttaaatcagctatactctgctagaggctgggaatggtcagaccacaaaccattaaactttctcaactgggatccagacaggcccagtgcacctactataggtggctccagctgtgcaagaatggatgctgagtctggtctgtggcagagcttttcctgtgaagctcaactgccctatgtctgcaggaaaccattaaataatacagtggagttaacagatgtctggacatactcagatacccgctgtgatgcaggctggctgccaaataatggattttgctatctgctggtaaatgaaagtaattcctgggataaggcacatgcgaaatgcaaagccttcagtagtgacctaatcagcattcattctctagcagatgtggaggtggttgtcacaaaactccataatgaggatatcaaagaagaagtgtggataggccttaagaacataaacataccaactttatttcagtggtcagatggtactgaagttactctaacatattgggatgagaatgagccaaatgttccctacaataagacgcccaactgtgtttcctacttaggagagctaggtcagtggaaagtccaatcatgtgaggagaaactaaaatatgtatgcaagagaaagggagaaaaactgaatgacgcaagttctgataagatgtgtcctccagatgagggctggaagagacatggagaaacctgttacaagatttatgaggatgaggtcccttttggaacaaactgcaatctgactatcactagcagatttgagcaagaatacctaaatgatttgatgaaaaagtatgataaatctctaagaaaatacttctggactggcctgagagatgtagattcttgtggagagtataactgggcaactgttggtggaagaaggcgggctgtaaccttttccaactggaattttcttgagccagcttccccgggcggctgcgtggctatgtctactggaaagtctgttggaaagtgggaggtgaaggactgcagaagcttcaaagcactttcaatttgcaagaaaatgagtggaccccttgggcctgaagaagcatcccctaagcctgatgacccctgtcctgaaggctggcagagtttccccgcaagtctttcttgttataaggtattccatgcagaaagaattgtaagaaagaggaactgggaagaagctgaacgattctgccaagcccttggagcacacctttctagcttcagccatgtggatgaaataaaggaatttcttcactttttaacggaccagttcagtggccagcattggctgtggattggtttgaataaaaggagcccagatttacaaggatcctggcaatggagtgatcgtacaccagtgtctactattatcatgccaaatgagtttcagcaggattatgacatcagagactgtgctgctgtcaaggtatttcataggccatggcgaagaggctggcatttctatgatgatagagaatttatttatttgaggccttttgcttgtgatacaaaacttgaatgggtgtgccaaattccaaaaggccgtactccaaaaacaccagactggtacaatccagaccgtgctggaattcatggacctccacttataattgaaggaagtgaatattggtttgttgctgatcttcacctaaactatgaagaagccgtcctgtactgtgccagcaatcacagctttcttgcaactataacatcttttgtgggactaaaagccatcaaaaacaaaatagcaaatatatctggtgatggacagaagtggtggataagaattagcgagtggccaatagatgatcattttacatactcacgatatccatggcaccgctttcctgtgacatttggagaggaatgcttgtacatgtctgccaagacttggcttatcgacttaggtaaaccaacagactgtagtaccaagttgcccttcatctgtgaaaaatataatgtttcttcgttagagaaatacagcccagattctgcagctaaagtgcaatgttctgagcaatggattccttttcagaataagtgttttctaaagatcaaacccgtgtctctcacattttctcaagcaagcgatacctgtcactcctatggtggcacccttccttcagtgttgagccagattgaacaagactttattacatccttgcttccggatatggaagctactttatggattggtttgcgctggactgcctatgaaaagataaacaaatggacagataacagagagctgacgtacagtaactttcacccattattggttagtgggaggctgagaataccagaaaatttttttgaggaagagtctcgctaccactgtgccctaatactcaacctccaaaaatcaccgtttactgggacgtggaattttacatcctgcagtgaacgccactttgtgtctctctgtcagaaatattcagaagttaaaagcagacagacgttgcagaatgcttcagaaactgtaaagtatctaaataatctgtacaaaataatcccaaagactctgacttggcacagtgctaaaagggagtgtctgaaaagtaacatgcagctggtgagcatcacggacccttaccagcaggcattcctcagtgtgcaggcgctccttcacaactcttccttatggatcggactcttcagtcaagatgatgaactcaactttggttggtcagatgggaaacgtcttcattttagtcgctgggctgaaactaatgggcaactcgaagactgtgtagtattagacactgatggattctggaaaacagttgattgcaatgacaatcaaccaggtgctatttgctactattcaggaaatgagactgaaaaagaggtcaaaccagttgacagtgttaaatgtccatctcctgttctaaatactccgtggataccatttcagaactgttgctacaatttcataataacaaagaataggcatatggcaacaacacaggatgaagttcatactaaatgccagaaactgaatccaaaatcacatattctgagtattcgagatgaaaaggagaataactttgttcttgagcaactgctgtacttcaattatatggcttcatgggtcatgttaggaataacttatagaaataagtctcttatgtggtttgataagaccccactgtcatatacacattggagagcaggaagaccaactataaaaaatgagaagtttttggctggtttaagtactgacggcttctgggatattcaaacctttaaagttattgaagaagcagtttattttcaccagcacagcattcttgcttgtaaaattgaaatggttgactacaaagaagaatataatactacactgccacagtttatgccatatgaagatggtatttacagtgttattcaaaaaaaggtaacatggtatgaagcattaaacatgtgttctcaaagtggaggtcacttggcaagcgttcacaaccaaaatggccagctctttctggaagatattgtaaaacgtgatggatttccactatgggttgggctctcaagtcatgatggaagtgaatcaagttttgaatggtctgatggtagtacatttgactatatcccatggaaaggccaaacatctcctggaaattgtgttctcttggatccaaaaggaacttggaaacatgaaaaatgcaactctgttaaggatggtgctatttgttataaacctacaaaatctaaaaagctgtcccgtcttacatattcatcaagatgtccagcagcaaaagagaatgggtcacggtggatccagtacaagggtcactgttacaagtctgatcaggcattgcacagtttttcagaggccaaaaaattgtgttcaaaacatgatcactctgcaactatcgtttccataaaagatgaagatgagaataaatttgtgagcagactgatgagggaaaataataacattaccatgagagtttggcttggattatctcaacattctgttgaccagtcttggagttggttagatggatcagaagtgacatttgtcaaatgggaaaataaaagtaagagtggtgttggaagatgtagcatgttgatagcttcaaatgaaacttggaaaaaagttgaatgtgaacatggttttggaagagttgtctgcaaagtgcctctgggccctgattacacagcaatagctatcatagttgccacactaagtatcttagttctcatgggcggactgatttggttcctcttccaaaggcaccgtttgcacctggcgggtttctcatcagttcgatatgcacaaggagtgaatgaagatgagattatgcttccttctttccatgactaaattcttctaaaagttttctaatttgcactaatgtgttatgagaaattagtcacttaaaatgtcccagtgtcagtatttactctgctccaaagtagaactcttaaatactttttcagttgtttagatcttaggcatgtgctggtatccacagttaattccctgctaaatgccatgtttatcaccctaattaatagaatggaggggactccaaagctggaactgaagtccaaattgtttgtacagtaatatgtttaatgttcattttctctgtatgaatgtgattggtaactaggatatgtatattttaatagaatttttaacaaaacttcttagaaaattaaaataggcatattactaggtgacatgtctactttttaatttttaagagcatccggccaaatgcaaaattagtacctcaaagtaaaaattgaactgtaaactctatcagcattgtttcaaaatagtcatttttagcactggggaaaaataaacaataagacatgcttactttttaatttttatttttttgagactgagtctctctctgttgcccaggctggagtacaatggcgtgatctcggctcactgcaaatctccgcctcccaggttcaagcgattctcctgcctcagcctcctgagtagctgggattacaggcaactgccaccatgcccggctaatttttgtatttttagtagagatggggtttcaccatgttggccaggctggtctcgaactcgtgaccgcaggtgatcctcccgcctcggcctcccaaagtgctgggattacaggcatgagccaccgcgcctggcctctgcttactttttatatagcaaaatgattcctcttggcaagatgtttcttatattattccaaagttatttcataccattattatgtaaatatgaagagtttttttctgtttataattgtttataaaacaatgacttttaaagatttagtgcttaacattttcccaagtgtgggaacattatttttagattgagtaggtaccttgtagcagtgtgctttgcattttctgatgtattacatgactgtttcttttgtaaagagaatcaactaggtatttaagactgataattttacaatttatatgcttcacatagcatgtcaacttttgactaagaattttgttttacttttttaacatgtgttaaacagagaaagggtccatgaaggaaagtgtatgagttgcatttgtaaaaatgagactttttcagtggaactctaaaccttgtgatgactactaacaaatgtaaaattatgagtgattaagaaaacattgctttgtggttatcactttaagttttgacacctagattatagtcttagtaatagcatccactggaaaaggtgaaaatgttttattcggcatttaacttacatttgtactttatttttgtataaaatccatagatttattttacatttagagtatttacactatgataaagttgtaaataattttctaagacagtttttatatagtctacagttgtcctgatttcttattgaatttgttagactagttctcttgtcctgtgatctgtgtacaattttagtcactaagactttcctccaagaactaagccaacttgatgtgaaaagcacagctgtatataatggtgatgtcataataaagttgttttatcttttaagtaaaagtaaaaaaaa

SEQ ID NO: 492 - protein, 1722 aa, Homo Sapiens
MRTGWATPRRPAGLLMLLFWFFDLAEPSGRAANDPFTIVHGNTGKCIKPVYGWIVADDCDETEDKLWKWVSQHRLFHLHSQKCLGLDITKSVNELRMFSCDSSAMLWWKCEHHSLYGAARYRLALKDGHGTAISNASDVWKKGGSEESLCDQPYHEIYTRDGNSYGRPCEFPFLIDGTWHHDCILDEDHSGPWCATTLNYEYDRKWGICLKPENGCEDNWEKNEQFGSCYQFNTQTALSWKEAYVSCQNQGADLLSINSAAELTYLKEKEGIAKIFWIGLNQLYSARGWEWSDHKPLNFLNWDPDRPSAPTIGGSSCARMDAESGLWQSFSCEAQLPYVCRKPLNNTVELTDVWTYSDTRCDAGWLPNNGFCYLLVNESNSWDKAHAKCKAFSSDLISIHSLADVEVVVTKLHNEDIKEEVWIGLKNINIPTLFQWSDGTEVTLTYWDENEPNVPYNKTPNCVSYLGELGQWKVQSCEEKLKYVCKRKGEKLNDASSDKMCPPDEGWKRHGETCYKIYEDEVPFGTNCNLTITSRFEQEYLNDLMKKYDKSLRKYFWTGLRDVDSCGEYNWATVGGRRRAVTFSNWNFLEPASPGGCVAMSTGKSVGKWEVKDCRSFKALSICKKMSGPLGPEEASPKPDDPCPEGWQSFPASLSCYKVFHAERIVRKRNWEEAERFCQALGAHLSSFSHVDEIKEFLHFLTDQFSGQHWLWIGLNKRSPDLQGSWQWSDRTPVSTIIMPNEFQQDYDIRDCAAVKVFHRPWRRGWHFYDDREFIYLRPFACDTKLEWVCQIPKGRTPKTPDWYNPDRAGIHGPPLIIEGSEYWFVADLHLNYEEAVLYCASNHSFLATITSFVGLKAIKNKIANISGDGQKWWIRISEWPIDDHFTYSRYPWHRFPVTFGEECLYMSAKTWLIDLGKPTDCSTKLPFICEKYNVSSLEKYSPDSAAKVQCSEQWIPFQNKCFLKIKPVSLTFSQASDTCHSYGGTLPSVLSQIEQDFITSLLPDMEATLWIGLRWTAYEKINKWTDNRELTYSNFHPLLVSGRLRIPENFFEEESRYHCALILNLQKSPFTGTWNFTSCSERHFVSLCQKYSEVKSRQTLQNASETVKYLNNLYKIIPKTLTWHSAKRECLKSNMQLVSITDPYQQAFLSVQALLHNSSLWIGLFSQDDELNFGWSDGKRLHFSRWAETNGQLEDCVVLDTDGFWKTVDCNDNQPGAICYYSGNETEKEVKPVDSVKCPSPVLNTPWIPFQNCCYNFIITKNRHMATTQDEVHTKCQKLNPKSHILSIRDEKENNFVLEQLLYFNYMASWVMLGITYRNKSLMWFDKTPLSYTHWRAGRPTIKNEKFLAGLSTDGFWDIQTFKVIEEAVYFHQHSILACKIEMVDYKEEYNTTLPQFMPYEDGIYSVIQKKVTWYEALNMCSQSGGHLASVHNQNGQLFLEDIVKRDGFPLWVGLSSHDGSESSFEWSDGSTFDYIPWKGQTSPGNCVLLDPKGTWKHEKCNSVKDGAICYKPTKSKKLSRLTYSSRCPAAKENGSRWIQYKGHCYKSDQALHSFSEAKKLCSKHDHSATIVSIKDEDENKFVSRLMRENNNITMRVWLGLSQHSVDQSWSWLDGSEVTFVKWENKSKSGVGRCSMLIASNETWKKVECEHGFGRVVCKVPLGPDYTAIAIIVATLSILVLMGGLIWFLFQRHRLHLAGFSSVRYAQGVNEDEIMLPSFHD

SEQ ID NO: 493 - DNA, 3678 bp, Homo Sapiens
gacgcgcgccgggagccgcgggccgggccagccgggccgccggggcccagtgcgccgcgctcgcagccggtagcgcgccagcgccgtaggcgctcgctcggcagccgcggggccctaggccgtgccggggagggggcgagggcggcgcccaggcgcctgccgccccggaggcaggatgagcatcgagatcccggcgggactgacggagctgctgcagggcttcacggtggaggtgctgaggcaccagcccgcggacctgctggagttcgcgctgcagcacttcacccgcctgcagcaggagaacgagcgcaaaggcaccgcgcgcttcggccatgagggcaggacctggggggacctgggcgccgctgccgggggcggcacccccagcaagggggtcaacttcgccgaggagcccatgcagtccgactccgaggacggggaggaggaggaggcggcgcccgcggacgcaggggcgttcaatgctccagtaataaaccgattcacaaggcgtgcctcagtatgtgcagaagcttataatcctgatgaagaagaagatgatgcagagtccaggattatacatccaaaaactgatgatcaaagaaataggttgcaagaggcttgcaaagacatcctgctgtttaagaatctggatccggagcagatgtctcaagtattagatgccatgtttgaaaaattggtcaaagatggggagcatgtaattgatcaaggtgacgatggtgacaacttttatgtaattgatagaggcacatttgatatttatgtgaaatgtgatggtgttggaagatgtgttggtaactatgataatcgtgggagtttcggcgaactggccttaatgtacaatacacccagagcagctacaatcactgctacctctcctggtgctctgtggggtttggacagggtaaccttcaggagaataattgtgaaaaacaatgccaaaaagagaaaaatgtatgaaagctttattgagtcactgccattccttaaatctttggagttttctgaacgcctgaaagtagtagatgtgataggcaccaaagtatacaacgatggagaacaaatcattgctcagggagattcggctgattcttttttcattgtagaatctggagaagtgaaaattactatgaaaagaaagggtaaatcagaagtggaagagaatggtgcagtagaaatcgctcgatgctcgcggggacagtactttggagagcttgccctggtaactaacaaacctcgagcagcttctgcccacgccattgggactgtcaaatgtttagcaatggatgtgcaagcatttgaaaggcttctgggaccttgcatggaaattatgaaaaggaacatcgctacctatgaagaacagttagttgccctgtttggaacgaacatggatattgttgaacccactgcatgaagcaaaagtatggagcaagacctgtagtgacaaaattacacagtagtggttagtccactgagaatgtgtttgtgtagatgccaagcattttctgtgatttcaggttttttcctttttttacatttacaacgtatcaataaacagtagtgatttaatagtcaataggctttaacatcactttctaaagagtagttcataaaaaaatcaacatactgataaaatgactttgtactccacaaaattatgactgaaaggtttattaaaatgattgtaatatatagaaagtatctgtgtttaagaagataattaaaggatgttatcataggctatatgtgttttacttattcagactgataatcatattagtgactatccccatgtaagagggcacttggcaattaaacatgctacacagcatggcatcacttttttttataactcattaaacacagtaaaattttaatcatttttgttttaaagttttctagcttgataagttatgtgctggccttggcctattggtgaaatggtataaaatatcatatgcagttttaaaactttttatatttttgcaataaagtacattttgactttgttggcataatgtcagtaacatacatattccagtggttttatggacaggcaatttagtcattatgataataaggaaaacagtgttttagatgagagatcattaatgcatttttccctcatcaagcatatatctgcttttttttattttgcaattctctgtattctatgtctttaaaaatttgatcttgacatttaatgtcacaaagttttgtttttttaaaaagtgatttaaacttaagatccgacattttttgtattctttaagattttacacctaaaaaatctctcctatcccaaaaataatgtgggatccttatcagcatgcccacagtttatttctttgttcttcactaggcctgcataatacagtcctatgtagacatctgttcccttgggtttccgttctttcttaggatggttgccaacccacaatctcattgatcagcagccaatatgggtttgtttggtttttttaattcttaaaaacatcctctagaggaatagaaacaaatttttatgagcataaccctatataaagacaaaatgaatttctgaccttaccatatataccattaggccttgccattgctttaatgtagactcatagttgaaattagtgcagaaagaactcagatgtactagattttcattgttcattgatatgctcagtatgctgccacataagatgaatttaattatattcaaccaaagcaatatactcttacatgatttctaggccccatgacccagtgtctagagacattaattctaaccagttgtttgcttttaaatgagtgatttcattttgggaaacaggtttcaaatgaatatatatacatgggtaaaattactctgtgctagtgtagtcttactagagaatgtttatggtcccacttgtatatgaaaatgtggttagaatgttaattggataatgtatatataagaagttaaagtatgtaaagtataacttcagccacatttttagaacactgtttaacatttttgcaaaaccttcttgtaggaaaagagagctctctacatgaagatgacttgttttatatttcagattttattttaaaagccatgtctgttaaacaagaaaaaacacaaaagaactccagattcctggttcatcattctgtattcttactcactttttcaagttatctattttgttgcataaactaattgttaactattcatggaacagcaaacgcctgtttaataaagaactttgaccaaggctataaatgccacgtacattattttcagtattgttggttatatttaaattttccttacaataaagcacacttttataataaaatacatgaattattgtttttcatacttttttgcttgtttctttaaagttttctgacgtgcataatgcataattcattgaaaagcatgatagcaatgtggcatgtggaagcgaacccccagggcataacatagtaagaaagtatggttctgtatggcaataggtttttaaaattattagctattcatcatgtgtgggagaaataattgtggtgtgttgcagatttatttggccatttagaataaccaaatcaatctggctaactaggaatttatgtgtaaaattatctgattaaaacagctcaagtttgaaaaaaaaaaaaaaaaaa

SEQ ID NO: 494 - protein, 418 aa, Homo Sapiens
MSIEIPAGLTELLQGFTVEVLRHQPADLLEFALQHFTRLQQENERKGTARFGHEGRTWGDLGAAAGGGTPSKGVNFAEEPMQSDSEDGEEEEAAPADAGAFNAPVINRFTRRASVCAEAYNPDEEEDDAESRIIHPKTDDQRNRLQEACKDILLFKNLDPEQMSQVLDAMFEKLVKDGEHVIDQGDDGDNFYVIDRGTFDIYVKCDGVGRCVGNYDNRGSFGELALMYNTPRAATITATSPGALWGLDRVTFRRIIVKNNAKKRKMYESFIESLPFLKSLEFSERLKVVDVIGTKVYNDGEQIIAQGDSADSFFIVESGEVKITMKRKGKSEVEENGAVEIARCSRGQYFGELALVTNKPRAASAHAIGTVKCLAMDVQAFERLLGPCMEIMKRNIATYEEQLVALFGTNMDIVEPTA

SEQ ID NO: 495 - DNA, 4022 bp, Homo Sapiens
aataatctccgctcccagactactccgttcctccggatttcgatccccctttttctatctgtcaatcagcgccgcctttgaactgaaaagctctcagtctaacttcaactcactcaaatccgagcggcacgagcacctcctgtatcttcggcttccccccccctttgctctttatatctgacttcttgttgttgttggtgttttttttttttttaccccccttttttatttattatttttttgcacattgatcggatccttgggaacgagagaaaaaagaaacccaaactcacgcgtgcagaagatctccccccccttcccctcccctcctccctcttttcccctccccaggagaaaaagacccccaagcagaaaaaagttcaccttggactcgtctttttcttgcaatattttttgggggggcaaaactttttgggggtgattttttttggcttttcttcctccttcatttttcttccaaaattgctgctggtgggtgaaaaaaaaatgccgcagctgaacggcggtggaggggatgacctaggcgccaacgacgaactgatttccttcaaagacgagggcgaacaggaggagaagagctccgaaaactcctcggcagagagggatttagctgatgtcaaatcgtctctagtcaatgaatcagaaacgaatcaaaacagctcctccgattccgaggcggaaagacggcctccgcctcgctccgaaagtttccgagacaaatcccgggaaagtttggaagaagcggccaagaggcaagatggagggctctttaaggggccaccgtatcccggctaccccttcatcatgatccccgacctgacgagcccctacctccccaacggatcgctctcgcccaccgcccgaaccctccattttcagtccggcagcacacattactctgcgtacaaaacgattgaacaccagattgcagttcagtatctccagatgaaatggccactgcttgatgtccaggcagggagcctccagagtagacaagccctcaaggatgcccggtccccatcaccggcacacattgtctctaacaaagtgccagtggtgcagcaccctcaccatgtccaccccctcacgcctcttatcacgtacagcaatgaacacttcacgccgggaaacccacctccacacttaccagccgacgtagaccccaaaacaggaatcccacggcctccgcaccctccagatatatccccgtattacccactatcgcctggcaccgtaggacaaatcccccatccgctaggatggttagtaccacagcaaggtcaaccagtgtacccaatcacgacaggaggattcagacacccctaccccacagctctgaccgtcaatgcttccatgtccaggttccctccccatatggtcccaccacatcatacgctacacacgacgggcattccgcatccggccatagtcacaccaacagtcaaacaggaatcgtcccagagtgatgtcggctcactccatagttcaaagcatcaggactccaaaaaggaagaagaaaagaagaagccccacataaagaaacctcttaatgcattcatgttgtatatgaaggaaatgagagcaaaggtcgtagctgagtgcacgttgaaagaaagcgcggccatcaaccagatccttgggcggaggtggcatgcactgtccagagaagagcaagcgaaatactacgagctggcccggaaggagcgacagcttcatatgcaactgtaccccggctggtccgcgcgggataactatggaaagaagaagaagaggaaaagggacaagcagccgggagagaccaatgatgcaaatactccaaagaagtgtcgggcactgttcgggcttgaccgacagactttatggtgcaaaccgtgcaggagaaaaaaaaagtgcgttcgctacatacaaggtgaaggcagctgcctcagcccaccctcttcagatggaagcttactagattcgcctcccccctccccgaacctgctaggctcccctccccgagacgccaagtcacagactgagcagacccagcctctgtcgctgtccctgaagcccgaccccctggcccacctgtccatgatgcctccgccacccgccctcctgctcgctgaggccacccacaaggcctccgccctctgtcccaacggggccctggacctgcccccagccgctttgcagcctgccgccccctcctcatcaattgcacagccgtcgacttcttccttacattcccacagctccctggccgggacccagccccagccgctgtcgctcgtcaccaagtctttagaatagctttagcgtcgtgaaccccgctgctttgtttatggttttgtttcacttttcttaatttgccccccacccccaccttgaaaggttttgttttgtactctcttaattttgtgccatgtggctacattagttgatgtttatcgagttcattggtcaatatttgacccattcttatttcaatttctccttttaaatatgtagatgagagaagaacctcatgattctaccaaaatttttatcaacagctgtttaaagtctttgtagcgtttaaaaaatatatatatatacataactgttatgtagttcggatagcttagttttaaaagactgattaaaaaacaaaaagaaaaaaaaagcaattttgaagcagccctccagaaggagttggttctgtattatttgtattaaatacgagcttgcgaaccaatcattttacatctggtttttaaaccgtaagggcaccatgaatgcagtgccgttactttttttttttttttctgtgtgaaacaactcttattgtgatgttacttgttattgtttaaatgtacagaaacaaagggtaaaaatgtgttaatataccttgttccatggtgttgttcttttggggggaggggacgctactcaacacttaatagaatcacaacgctgttgggccagtagtatttattgctttagagattgcttgtcgtacctgtatgtcgtccctttttaaatatgttttcctttttcttgaaactgtataaagtttttttcccccttagcataagcatcttatatataacaactcatttgtacaaggtttttaagtttatatataaaatgtgtatatatatttttgtttcccctttttgacttttttttttctgtatgaaacccagatgtcaccaaatggacattaatagttgcattaaggatcagtagcattaacaaaagttgctttaaaagccattatgtaaaacaagacttgaaaatgagtgagggaattttagcgacactgtctgagcagcagtgggaaccatcttcgtttcccctttgaactcccagtgggatgccctaccctgcgcccttaggacccggactgaccgtgtacaaaactttacgtgccaaaattctcagtgaatttagctttctccctctttttgatgctgtaatttttgttcatcatgttttgctgtgatgttacataggtagatttgtatgtagttttaatgtcacctataacaaaatgtgtttggtagcagattgtccagaaagcattttaaatgaagaggtataaacccttaagggccaaaattctgtatattagattactcttaaacgaaaaaccagctgccgcttttatgtacacatattacatacgagtaggcagcagactttaaaaataaaaaaaacctaggcatgttgatgttgcaaaatgctgtataaagctgaaacctgttcattcagtgccattgtagttgacatgaagcgattgtaaaactgtctccgatttttctctggtttattaaaatgctaactataacattttttgtgaatactttgaatgtttcctaacagttgtgatgttactgttccgttttatgctcttattccaagttcatttttaatggtttggaagccatttttgtaatgaataaatgttcatgctgtacagtatctgtagcatgccgttctggattaataaaagcaacttagtatgtgcagataaa

SEQ ID NO: 496 - protein, 602 aa, Homo Sapiens
MPQLNGGGGDDLGANDELISFKDEGEQEEKSSENSSAERDLADVKSSLVNESETNQNSSSDSEAERRPPPRSESFRDKSRESLEEAAKRQDGGLFKGPPYPGYPFIMIPDLTSPYLPNGSLSPTARTLHFQSGSTHYSAYKTIEHQIAVQYLQMKWPLLDVQAGSLQSRQALKDARSPSPAHIVSNKVPVVQHPHHVHPLTPLITYSNEHFTPGNPPPHLPADVDPKTGIPRPPHPPDISPYYPLSPGTVGQIPHPLGWLVPQQGQPVYPITTGGFRHPYPTALTVNASMSRFPPHMVPPHHTLHTTGIPHPAIVTPTVKQESSQSDVGSLHSSKHQDSKKEEEKKKPHIKKPLNAFMLYMKEMRAKVVAECTLKESAAINQILGRRWHALSREEQAKYYELARKERQLHMQLYPGWSARDNYGKKKKRKRDKQPGETNDANTPKKCRALFGLDRQTLWCKPCRRKKKCVRYIQGEGSCLSPPSSDGSLLDSPPPSPNLLGSPPRDAKSQTEQTQPLSLSLKPDPLAHLSMMPPPPALLLAEATHKASALCPNGALDLPPAALQPAAPSSSIAQPSTSSLHSHSSLAGTQPQPLSLVTKSLE

SEQ ID NO: 497 - DNA, 3524 bp, Homo Sapiens
caggaagaggtatttcttggggatgctaccaaggcagagactgtgaagaaggaagaacgttgcttgggcaaaaggagcatattctcaggagacggggcccctgcctgccacaccaagcattaggccaccaggaagacccccatctgcaagcaagcctagccttccagggagaaagaggcccctgcagctccttcatcatgaactggcacatgatcatctctgggcttattgtggtagtgcttaaagttgttggaatgaccttatttctactttatttcccacagatttttaacaaaagtaacgatggtttcaccaccaccaggagctatggaacagtctcacagatttttgggagcagttccccaagtcccaacggcttcattaccacaaggagctatggaacagtctgccccaaagactgggaattttatcaagcaagatgttttttcttatccacttctgaatcatcttggaatgaaagcagggacttttgcaaaggaaaaggatccacattggcaattgtcaacacgccagagaaactgaagtttcttcaggacataactgatgctgagaagtattttattggcttaatttaccatcgtgaagagaaaaggtggcgttggatcaacaactctgtgttcaatggcaatgttaccaatcagaatcagaatttcaactgtgcgaccattggcctaacaaagacatttgatgctgcatcatgtgacatcagctaccgcaggatctgtgagaagaatgccaaatgatcacagttccctgtgacaagaactatacttgcaactctttttgaatccatacaggtcgtctggccaatgattcttttacttacctatctgtctaccagtagcggtccttgcccatttgggaaactgagcttctttcttctgcactgggggactggatgctagccatctccaggagacaggatcagttttacggaaacaactcagttagtatagagatgaggtccgcttctgtagtactgagcatttctgactgatcaaaaaggcctagtctgttgacagggtttgttttattttagcctcagagtataccatactactagggagtaactgtagagtgagaaattataaacattatttagggattaccatggtggaagagggataaacataggtcctgtgacttcgtctctgttctcaagggaaccccattcacatgcccctcctaactccacaagcgagggtagcagaggctctcctcagtctgaactaaggcttggccttggggagggctcctagtgctgagcttggagcagcacggacagcagcattgtttatgggaatggagagaggtctgggcaggataggaaccttcttggagacccctttgaagaaaaccaggcagccaagggagccaaacacactagatttctgttcttcagcaaagccctgaagagacacttaagctaaaaattcccttgtcatatttctgaaactccattataacatatgtaactcctttgtaaccaaaatttaggtaagcaggcttcctttgctctgaaggttttgagtacctggctgtatttgttgagtatttttaaaattttggatagtctcttaggcaacaataatcacaatatattcatcccttcagttctggagaaagcctgataccaggcacagcctactgaccccaaggagcctggcactgattggcatcacattgatctagaactggtccagccgacgaagagtaggaaaagagaagggctgctcagggaaacattggctgggggcacggaataagcacatagtaaaaagggaacatcagggtcaaatggaaatcacctgagacaggaaacagggagttcatttggccacactggaagaaaggcaagaaagaggaagacaagtcttggagtaccctggctgttctccacactcacaagacatcagctatatactctgcttggtgcataagaaagagaaaagagatgccttttgtgttttgagtaagaataattaaaccataaggaagaccatgtataaaactgatggaaataatagtcaccaaagtacagcacataccattttgtgtctaataacaatgtagcacagtaatgactgtacatgtcattgtatgtataccaaacaagattgttgtaaatcatattttttattacaacactaagttctgcttctgcattcctaggtttcatcatttttggctccttagcatggccacttacaattttttaacatgagataacacatcaggtgtcagaacttgcttgaagggaattaccagaagtaatttgtgtttgagatggggtggaaattggaattatattagtagccggtggagatacaagttctctgactgtgttgggaaaggataagtgctaccgttgagaagggaagaaaggctgagtctaggtggagaaaaatatcaacagaactctagccaaaggcaagccccagaactcagacaacagaaaggaaatcctaatccttctgttttgagaagagagaactgtagttgcttcacttcctatttcatgacagaataactgcaaacttttaagatcaggaaatgtagacatctagtgatttctttagtagacagtttaatttcccccaagattaggagacacttctgtgcaggttctaaaaggagcccaatggcctggggtgggagtggggagtagatagggaatatgtgggatttggtttaagttcatcattggaagagttcctggatccttgcaagcttagataaatgtgatctttattagatagcagtggcatgctttaaaaaaaaaaaaggcaatgaaaatttagcaagccactgaatttgagttttcactttgtttctaatatgctgtgtgaatcagtacagttttcttaccctttcttggtcttaatttccttactgataaaatggggtagtaatacctatctcaaaaaattattgcacatattaaataacattcctctatgtatctcaatggcattagacattaggagaagcattttgtggaggatttgaagttgagatcttcatccaagaagtagcttttcaatttgctagaagcttaatgtaggcaagccacttcatttttcagaacttgtttactcatttataatatgggaataaaaatttgtgcaagtcagagaagggtgccttaaaaatgttgtggccaagccacatgagatcaaagacacacttttcatgacctcaaatgtgggcccagcctaggtcagccaacccccatccaacccttagactcacgaacaaatccacctgagatcagcagagccaccctagatcagctgaaactctaagcacaaaaataaaaacttatcactgtataccactggagttttctggttatctctcgtatagcaaaatctaactgatgcaatctccatctggccttcatccttctccctttattgtcctttcgtgtattgttcatccagcaaccaggatgatcttgttaaaacattaaacagattctgtcactcttaaaaaaaaaaaaa

SEQ ID NO: 498 - protein, 188 aa, Homo Sapiens
MNWHMIISGLIVVVLKVVGMTLFLLYFPQIFNKSNDGFTTTRSYGTVSQIFGSSSPSPNGFITTRSYGTVCPKDWEFYQARCFFLSTSESSWNESRDFCKGKGSTLAIVNTPEKLKFLQDITDAEKYFIGLIYHREEKRWRWINNSVFNGNVTNQNQNFNCATIGLTKTFDAASCDISYRRICEKNAK

SEQ ID NO: 499 - DNA, 2124 bp, Homo Sapiens
ggcacaatgctcttgccctctaagaaggacctcaagactgccctggatgtctttgctgttttccagtggtccttcagtgccttgcttatcacaaccactgtgattgctgtcaacctctacctggtggtgttcacaccatactggcctgtcactgtgcttattcttacctggctggcttttgactggaagacccctcagcgaggcggccgccggtttacctgtgtgaggcactggcgcctgtggaaacactacagcgattatttccctctcaagcttctgaagactcatgacatctgccccagccgcaactacatcctcgtctgccaccctcatgggctctttgcccatggatggtttggccactttgccacagaggcctcaggcttctccaagatatttcctggcatcaccccttacatactcacactgggagcctttttctggatgcctttcctcagagaatatgtaatgtctacaggggcctgctctgtgagtcgatcctccattgactttctgctgactcataaaggcacaggcaacatggtcattgtggtgattggtggactggctgagtgcagatacagcctgccaggttcttctaccctggtgttgaagaaccggtctggctttgtgcgcatggcccttcagcatggggtgcctctaatacctgcctatgcctttggggagacggacctctatgatcagcacattttcactcctggtggctttgtcaaccgcttccagaagtggttccagagcatggtacacatctacccttgtgctttctatggacgtggcttcaccaagaactcctggggccttctgccctatagtcggcctgtaaccaccatcgtcggggagcctctaccaatgcccaagattgagaatccaagccaggagatcgtggctaaatatcacacactctatattgatgccctacgtaaactgtttgaccagcataagaccaagtttggtatctcagagacccaggagctggagataatttgacagacatccccagtagccttcaccctggctggaagctcttttctgccctttctttgcagctactggtgagatagtcccaagaaacagggaagagcctaggggagaggtgccctgacggcactttggtgccagcattgaggaaaacaatggacaaaataaaaagcccatcttctgataactgcgtgtgcaccaactactctgttttgaaggctctgggatgcatgtctctccttctctagctgtcaaacagccccatctcccggcattgagccccatcttctggcattgagtcctgcttcctacaggagtaggactggggccttgagagccagtgggctttgagtttaagctccaccaacttcaagccatgtgactttggggcaatcagtcacctctgagcctcctttcttcttctataaaatgagactaacaatctgtctcttgcttacctcaaaggccgttgggaagatcaaacaatattggatgtgattgaactttataaactggagagctacaccattttcttctccaaccattttacccatttcctgtccctgagcaaacaacgcccgaaataccctctgctacccactagccctcactcagtttctgcctcacaaagctgtaacagaatgggttgggctcaggcctaattttctctgtcattccctcagcaacttgcctatacttgtgtggccctataattctggcctttgtttgagagtcagccagcctgctcaggatgaaaatgaggcgcctggcttttagcagccataaagaactctccttctgaatggcaagtctctcagactcttggtctaatggctgttgcaatgacaggctacaaaatttggctcacatccctctcattccatccctcttgggtgggtgccatttggtccagtgatttacctgcattacgttggtcaatttggtctacaacatcctgcgtgtttactgcagtgtgagctgctgcctctatcctgggtgcctgcctcatgtgatgatttgtatacagtggccaaagacatgcttctgcttttctgctgtctttgttacttcttgtgccagagattacgttttccctgagcttccataaagtgtttttaaacagtc

SEQ ID NO: 500 - protein, 333 aa, Homo Sapiens
MLLPSKKDLKTALDVFAVFQWSFSALLITTTVIAVNLYLVVFTPYWPVTVLILTWLAFDWKTPQRGGRRFTCVRHWRLWKHYSDYFPLKLLKTHDICPSRNYILVCHPHGLFAHGWFGHFATEASGFSKIFPGITPYILTLGAFFWMPFLREYVMSTGACSVSRSSIDFLLTHKGTGNMVIVVIGGLAECRYSLPGSSTLVLKNRSGFVRMALQHGVPLIPAYAFGETDLYDQHIFTPGGFVNRFQKWFQSMVHIYPCAFYGRGFTKNSWGLLPYSRPVTTIVGEPLPMPKIENPSQEIVAKYHTLYIDALRKLFDQHKTKFGISETQELEII

SEQ ID NO: 501 - DNA, 4131 bp, Homo Sapiens
atcccgcccgcatacagcccgcatcccgccggggaagcgagcccagtccagcgctgcccgtccagtcctcgcccaagatttaaagcccgcaagttttgttcttgagaccagcgactttagctccgatgcgggaaggaaagccgacctccgatttggacatttaaagagctgggcttgaacttcgtgagtttcgctctaaactgcccttgaaatgaagctggacttggaggtggcatggaatattcacatgggagagccgcatgaggccgcccaccacgcttcctgaaggatgcccgtgtggaagaattttgacgtgccagtgtcctcgttctacagggtgttccattcttccgcaatctcagaaaaatgggactaaaagaaactattttgtaaaataagaagacttccatttttaatgaccaacatgtattaagatggacacctactctacgaaacacgaagttctatggtctcgaagaagcccgtgcctgtttaaaactgatcctaactaaaaacagacttgagtggatatgagaatgttggttagtggcagaagagtcaaaaaatggcagttaattattcagttatttgctacttgttttttagcgagcctcatgtttttttgggaaccaatcgataatcacattgtgagccatatgaagtcatattcttacagatacctcataaatagctatgactttgtgaatgataccctgtctcttaagcacacctcagcggggcctcgctaccaatacttgattaaccacaaggaaaagtgtcaagctcaagacgtcctccttttactgtttgtaaaaactgctcctgaaaactatgatcgacgttccggaattagaaggacgtggggcaatgaaaattatgttcggtctcagctgaatgccaacatcaaaactctgtttgccttaggaactcctaatccactggagggagaagaactacaaagaaaactggcttgggaagatcaaaggtacaatgatataattcagcaagactttgttgattctttctacaatcttactctgaaattacttatgcagttcagttgggcaaatacctattgtccacatgccaaatttcttatgactgctgatgatgacatatttattcacatgccaaatctgattgagtaccttcaaagtttagaacaaattggtgttcaagacttttggattggtcgtgttcatcgtggtgcccctcccattagagataaaagcagcaaatactacgtgtcctatgaaatgtaccagtggccagcttaccctgactacacagccggagctgcctatgtaatctccggtgatgtagctgccaaagtctatgaggcatcacagacactaaattcaagtctttacatagacgatgtgttcatgggcctctgtgccaataaaatagggatagtaccgcaggaccatgtgtttttttctggagagggtaaaactccttatcatccctgcatctatgaaaaaatgatgacatctcatggacacttagaagatctccaggacctttggaagaatgctacagatcctaaagtaaaaaccatttccaaaggtttttttggtcaaatatactgcagattaatgaagataattctcctttgtaaaattagctatgtggacacatacccttgtagggctgcgtttatctaatagtacttgaatgttgtatgttttcactgtcactgagtcaaacctggatgaaaaaaacctttaaatgttcgtctataccctaagtaaaatgaggacgaaagacaaatattttgaaagcctagtccatcagaatgtttctttgattctagaagctgtttaatatcacttatctacttcattgcctaagttcatttcaaagaatttgtatttagaaaaggtttatattattagtgaaaacaaaactaaagggaagttcaagttctcatgtaatgccacatatatacttgaggtgtagagatgttattaagaagttttgatgttagaataattgcttttggaaaataccaaatgaacgtacagtacaacatttcaaggaaatgaatatattgttagaccaggtaagcaagtttatttttgttaaagagcacttggtggaggtagtaggggcagggaaaggtcagcataggagagaaagttcatgaatctggtaaaacagtctcttgttcttaagaggagatgtagaaaaatgtgtacaatgttattataaacagacaaatcacgtcttaccacatccatgtagctactggtgttagagtcattaaaatacctttttttgcatcttttttcaaagtttaatgtgaacttttagaaaagtgattaatgttgccctaatactttatatgtttttaatggatttttttttaagtattagaaaatgacacataacacgggcagctggttgctcatagggtccttctctagggagaaaccattgttaattcaaataagctgattttaatgacgttttcaactggtttttaaatattcaatattggtctgtgtttaagtttgttatttgaatgtaatttacatagaggaatataataatggagagacttcaaatggaaagacagaacattacaagcctaatgtctccataattttataaaatgaaatcttagtgtctaaatccttgtactgattactaaaattaacccactcctccccaacaaggtcttataaaccacagcactttgttccaagttcagagttttaaattgagagcattaaacatcaaagttataatatctaaaacaatttatttttcatcaataactgtcagaggtgatctttattttctaaatatttcaaacttgaaaacagagtaaaaaagtgatagaaaagttgccagtttggggttaaagcatttttaaagctgcatgttccttgtaatcaaagagatgtgtctgagatctaatagagtaagttacatttattttacaaagcaggataaaaatgtggctataatacacactacctcccttcactacagaaagaactaggtggtgtctactgctagggagattatatgaaggccaaaataatgacttcagcaagagtgactgaactcactctaaggcctttgactgcagaggcacctgttagggaaaatcagatgtctcatataataaggtgatgtcggaaacacgcaaaacaaaacgaaaaaagatttctcagtatacacaactgaatgatgatacttacaatttttagcaggtagctttttaatgtttacagaaattttaatttttttctattttgaaatttgaggcttgtttacattgcttagataatttagaatttttaactaatgtcaaaactacagtgtcaaacattctaggttgtagttactttcagagtagatacagggttttagatcattacagtttaagttttctgaccaattaaaaaaacatagagaacaaaagcatatttgaccaagcaacaagcttataattaatttttattagttgattgattaatgatgtattgccttttgcccatatataccctgtgtatctatacttggaagtgtttaaggttgccattggttgaaaacataagtgtctctggccatcaaagtgatcttgtttacagcagtgcttttgtgaaacaattatttatttgctgaaagagctcttctgaactgtgtccttttaatttttgcttagaatagaatggaacaagtttaaatttcaaggaaatatgaaggcacttcctttttttctaagaaggaagttgctagatgattccttcatcacacttacttaaagtactgagaagagtatctgtaaataaaagggttccaaccttttaaaaaagaaggaaaaaactttttggtgctccagtgtagggctatctttttaaaaaatgtcaacaaagggaaaataaactatcagcttggatggtcacttgaatagaagatggttatacacagtgttattgttaaaatttttttaccttttggttggtttgcatcttttttccatattgttaattttataccaaaatgttaaatatttgtattacttgaattttgctcttgtatggcaaaataattagtgagtttaaaaaaaatctatagtttccaataaacaactgaaaaattatcatgaaaaaaaaa

SEQ ID NO: 502 - protein, 378 aa, Homo Sapiens
MRMLVSGRRVKKWQLIIQLFATCFLASLMFFWEPIDNHIVSHMKSYSYRYLINSYDFVNDTLSLKHTSAGPRYQYLINHKEKCQAQDVLLLLFVKTAPENYDRRSGIRRTWGNENYVRSQLNANIKTLFALGTPNPLEGEELQRKLAWEDQRYNDIIQQDFVDSFYNLTLKLLMQFSWANTYCPHAKFLMTADDDIFIHMPNLIEYLQSLEQIGVQDFWIGRVHRGAPPIRDKSSKYYVSYEMYQWPAYPDYTAGAAYVISGDVAAKVYEASQTLNSSLYIDDVFMGLCANKIGIVPQDHVFFSGEGKTPYHPCIYEKMMTSHGHLEDLQDLWKNATDPKVKTISKGFFGQIYCRLMKIILLCKISYVDTYPCRAAFI

SEQ ID NO: 503 - DNA, 9471 bp, Homo Sapiens
cagcgcgcgctcctgcagccccggcggagtcccggcggggagcgcccgcgtaggcaggcacccggggcagccctccgtcctcgccgcgcggcctgagaacccctgggccctgggcgagggggctgggctgtgcagcccccgaggctaactgggcgggatcgcagctgcaggggttgtgcgagcagccacggcggcacctgtgccctgcgggcacccaccctgcccctgccgaggcaggcgcccaccgccggcggtgatgcggctgtgaagccctagtcgattaacgtgacagtgtcaggtggacccacagccatcccacctccccctctggggagtgctgagagtgaggcagcatggaggagaggaagcatgagaccatgaacccagctcatgtcctctttgaccggtttgtccaggccaccacctgcaagggaaccctcaaggctttccaggagctctgtgaccacctggaactaaagccaaaggactaccgctccttctatcacaagctcaagtccaagcttaactactggaaagccaaagccctctgggcaaaattggacaaacggggcagtcacaaagactacaaaaagggaaaagcgtgcactaacaccaagtgtctcatcattggggctggcccctgtggtctccgtacagccatcgacttatccttactgggggccaaggtggttgttattgagaaacgagatgccttctcccgcaacaacgtcttgcatctctggccattcaccatacatgatctacgaggtctgggtgccaagaagttctatggcaagttctgtgctggagccatcgaccatatcagtatccgtcagctccaactaatacttttgaaagtagccttgatcctaggcattgaaatccacgtcaatgtggaattccaaggacttatacagcctcctgaggaccaagagaatgaacggataggctggcgggcactggtgcaccccaagactcatcctgtgtcagagtatgaatttgaagtgatcatcggtggggatggtcggaggaacaccttggaagggtttcgtcggaaagaattccgtggcaaactggccatcgccatcacggcaaattttatcaaccgaaatacaacagcagaagctaaagtggaagagatcagtggtgtggcttttatattcaaccaaaaatttttccaggaactgagggaagccacaggtattgacttggagaacatcgtttactacaaagatgacacacactatttcgttatgacagccaaaaagcagagtttgctggacaaaggagtgatactacatgactacgccgacacagagctcctgctttcccgagaaaacgtggaccaggaggctctgctcagctatgccagggaggcggcagacttctctacccagcagcagctgccgtctctggattttgccatcaatcactatgggcagcccgatgtggccatgtttgacttcacttgtatgtatgcctccgagaacgccgccttggtgcgggagcagaacggacaccagttactagtggctctggtcggggacagcctcctagagcctttctggccaatgggaacaggaatagcccggggctttctagctgctatggactctgcctggatggtccgaagttggtctctaggaacgagccctttggaagtgctggcagagagggaaagtatttacaggttgctgcctcagaccacccctgagaatgtgagtaagaacttcagccagtacagtatcgaccctgtcactcggtatcccaatatcaacgtcaacttcctccggccaagccaggtgcgccatttatatgatactggcgaaacaaaagatattcacctggaaatggagagcctggtgaattcccgaaccacccccaaattgactcgcaatgagtctgtagctcgttcaagcaaactgctgggttggtgccagaggcagacagatggctatgcaggggtaaacgtgacagatctcaccatgtcctggaaaagtggcttggccctttgtgcaattatccatagataccgccctgacctgatagattttgattctttggatgagcaaaatgtggagaagaataaccaactggcctttgacattgctgagaaggaattgggcatttctcccatcatgacaggcaaagaaatggcctccgtgggggagcctgataagctgtccatggtgatgtacctgactcagttctacgagatgtttaaggactccctcccctctagcgacaccttggacctaaatgccgaggagaaagcagtcctgatagccagcaccagatcccctatctccttcctaagcaaacttggccagaccatctctcggaagcgttctcccaaggataaaaaggaaaaggacttggatggtgctgggaagaggagaaagaccagtcaatcagaggaggaggaagctcctcggggccacagaggagaaagaccgaccctggtgagcactctgacagacaggaggatggacgttgccgttgggaaccagaacaaagtgaagtacatggcgacccagctgctggccaaatttgaagagaatgcgcccgcacagtccatcggcatacggagacagggctccatgaagaaggagttcccgcagaacctgggaggcagcgacacatgctacttctgccagaagcgggtctacgtgatggagaggctgagtgccgagggcaagttcttccaccggagctgcttcaagtgcgagtactgcgccaccaccctgcgcctctcggcctacgcctacgacatcgaggatggtaaattctactgtaagccacactactgctatcgactctctggctacgcacaaaggaagagaccggcagtggctcccctgtctggaaaggaggccaaaggacccctgcaggatggcgccaccacagatgcaaacggacgggccaacgccgtggccagctccactgagagaaccccaggttcaggcgtgaacggcctggaggagcccagcatcgccaagcgactgaggggcaccccagagcggatcgagctggagaactaccgcctgtccctgaggcaggctgaggcactgcaggaggtaccggaggagactcaggccgagcacaacctgagcagcgtgctggacacgggcgccgaggaggacgtcgccagcagtagttccgagtctgagatggaggaggagggagaggaggaggaggaggagcctcgcctgcccccatctgacctgggtggtgttccgtggaaggaggccgtgcggatccatgcccttctgaaagggaaaagtgaagaggagctagaggcctcaaagagctttgggcctgggaatgaagaggaggaggaggaggaggaagaatatgaagaggaggaggaggaggactatgacgaggaggaggaagagtccagtgaagccgggaaccagaggctccagcaggtcatgcacgcggcggatcctctggagatccaggctgacgtgcactggactcatatccgtgagagagaggaggaagagaggatggcgccggcctctgagtcctctgcttccggagccccattggatgagaatgacctagaggaagatgtggactcagaaccagccgagatagaaggggaggcagcagaggatggggacccaggggacactggtgctgagctggatgatgatcagcactggtctgacagcccgtcggatgctgacagagagctgcgtttgccgtgcccagctgagggggaagcagagctggagctgagggtgtcggaagatgaggagaagctgcccgcctcaccgaagcaccaagagagaggtccctcccaagccaccagccccatccggtctccccaggaatcagctcttctgttcattccagtccacagcccctcaacagaggggccccaactcccacctgtccctgccgccacccaggagaaatcacctgaggagcgccttttccctgagcctttgctccccaaagagaagcccaaagctgatgccccctcggatctgaaagctgtgcactctcccatccgatcacagccagtgaccctgccagaagctaggactcctgtctcaccagggagcccgcagccccagccacccgtggcggcctccacgcccccacccagcccactccccatctgctcccagccccagccttccaccgaggccactgtcccatcccctacccagtcccccatacgcttccagcctgccccggccaaaacatccaccccactggcccctctccctgtccaaagccaaagtgacaccaaggacagactgggcagcccccttgctgtggatgaggccctcagacggagcgacctggtggaggagttctggatgaagagtgcggagatccgccgcagcctcgggctcacacctgtggaccgcagcaaggggcccgagcccagcttccccacgcctgccttcaggccagtgtccctcaaatcctattccgttgaaaagtccccccaggatgagggactccaccttctcaagcctctgtccatccccaaaaggctgggcctgccaaagccggaaggcgagccgttgtccctgccaaccccccggtccccgtccgacagagagctacgcagcgcccaggaggagcgcagggagctgtccagcagctctggcctgggcctgcacgggagctcctccaacatgaagacactgggcagccagagcttcaacacctcggactccgccatgctcacgcccccctccagcccgcccccaccgccacccccgggcgaggagcccgccaccttgcggaggaagctcagggaggccgagcccaatgcctcggtggtcccgccgcccttgcccgccacctggatgcggcccccccgggagcctgctcagccccccagagaggaggtgcggaagtcgtttgtggagagcgtggaggagattccctttgctgatgatgtggaggacacctatgacgacaagactgaggactcaagcctgcaggagaaattcttcacgcccccgtcctgctggccgcgccccgagaagcctcgccacccgcccctggccaaggagaacgggaggctgcctgctctggaggggacgctgcagccacagaagagggggctgcccttggtgtccgcggaagccaaggagttggccgaggagcgcatgcgagccagggagaagtccgtgaagagccaggcgctgcgggacgccatggccaggcagctgagcaggatgcagcagatggagctggcctcaggcgcccccaggccccgcaaggcgtcctcagcaccctcccagggcaaggagcgccggcctgactcccccacacgccccactctcaggggctccgaggagcccaccctgaagcatgaagccaccagcgaggaggtcctctccccgccgtcggactcagggggcccagatggctctttcacttcatccgagggctccagtgggaagagcaagaagaggtcgtcactcttctccccccgcagaaacaagaaggagaagaagtccaaaggcgagggccggcccccggagaagcccagctccaacctcctagaagaagccgccgccaaacccaagtccctgtggaagtccgtcttctccgggtacaagaaggacaagaagaagaaggccgacgacaagtcctgccccagcaccccctccagcggggccacggtggactctggaaagcacagggtgcttcccgtcgtaagggcagagctgcagctccggcgccagctgagcttctccgaggactcagacctctccagcgacgatgtccttgagaagtcctcacagaagtcccggcgagagccaagaacctacacggaggaggaactgaatgccaagctgacccggcgtgtgcaaaaggcagctcggagacaggccaagcaggaggagcttaagcggctgcatcgagcccagatcatccagcggcagctgcagcaggtggaggagaggcagcggcggctggaggaaaggggcgtggctgtggagaaggcgctccggggcgaagcaggcatgggcaagaaggacgaccccaagctgatgcaggagtggttcaagctagtgcaggagaagaacgccatggtgcgctacgagtcggagctgatgatctttgcccgggagctggagctggaagaccggcagagtcgactgcagcaggagctccgggaacgcatggcagtggaagatcaccttaagactgaggaggagctgtcagaagagaagcagattctcaatgagatgctggaggtggtggagcagagagactcactggtggcgctgctggaggagcagcggctccgggagagagaggaggacaaggacctggaggctgccatgctgtccaagggcttcagccttaactggtcctgagctcccacccaacgctccattttctgttggcatccgcctggccaggcagtggcatccaaaccacccggagccgcgatctgaggaggcctggcacctccttggagtttacgctcagatgcccgtgtgctgcttggaaagtggtcgagtcccgcgtgcagtggggagccccaggtgacagtggttatctgagacggctccacctcctgggaggaggcccacctggacctcccactcagaggagcagcacggcgtgtatggcatgacgcaggggaccaccccgcgcgctccctgaggatgtgctggctgtgccccttttttccactggcacatttggtaagagagggaagctgctccccgtcagaaccacagtgcgccgtgcgaggggcactgtcttcttcatgctccctggagcaccaccaaagaaacgtaaacaataccccacgaaagcagggtcaggggtcagggtgcgatcgagacccaggatgggggcgtccagtcatgcccaccccagcatcacaggagacatggaggtgcgggcaggctcctgaattattatgcaaattaggaggacgcaggaggggtctgccctccagccgaacaccacacactggaccctaagtggccaaatgcctgggccgcttgctggctgtggcctgaggcttgtgggttgctgcattttgcttgtagttcacaaccattttgacactggaaaatgctgactttgggggacaggatgaggccctacattctaagcccccagttggcagacaggcattgtccctgttccacatttatgtcgggacaggagatgaccttttcctccgtgtttttcctgtgtttgcacgttgaaatgaagctgacaacctggcaagacgctcagccgcttcaaaccctttttgtcaattaacttattttttaatacttgaaaagaagtaacttcgtttgtgtatctttactagaggaactgatcacctgcgcccgggtgcgggagccacagcggcatctggtgcgtcctacgcgacctggtccggggctgcccggtgctcctcacgtgcatctatttattagcctttctcttcgtatcactggcctggctggcatcagggagctgcccagaacccctgtgtgggtcctcctcacagctttctgtcccctcctccacccggtgcctgcctcaccctggcgctagaccatctggaccactcatgtgatgagggtgcatttccgttctgttttgggccaggccaacagcagagctgccactctcaccctcccagtgagaattccggctctgcagaactcgcccttgtctcagtttgggggccagggcatcaccttcctccgcacatatgttaaagaaggtttcaggatgggccctcatccacacaggccaagagggtgcaaggtgggaccctggaatcatgtggctggtgagaattccctcctcccagcctaagattcacccagacggaaacgcgagtgctgcagtggatgctgggatgcaggctggtgcctctcaagcagatcagcgactcccgcccttccttccgaaggcgacgggcacctgccttgtgccggatcttcatggggacataaagggcgagccccgaatcactagctcctatagccaaactgttcctttctcacggttccgcaccagcctggctgtgtacagctcatcaagccactgagctaatcggggtggggtgcttgtccatcaaagcagtcagcacatagcccagcgaggagccatccggaccagacccgcctgccaggggcgctccagccgcctgccgcctccgtgggctggggccagctgggagcagaggcctggcccctccaaggcgtcccgcagtggagcaggctgagtggctgtgctgaccttgggctttccatgggaaccacactgtgcttcaacttgaacattcatcccagctgcaaaggagcaaagaacctgtgtcatccttgtctgtccagaagctgccatctctctcccatgcacatccgggagataacgccgctagtggccgccacagcgctgattctccacctgttctcacgtgaggcaaaggtctccttttcttttctctttacttaaaaaaggggagaggagggtttctagattccatcttcaaaccccagtcgtcccataaaattggacgtgggaaaagaccttcactgcctgcgtggcctttcccagacctctcctcgaatgccacaaaaccggtccagccccggcagagccgccttcggcccttgtagctcctgctggccccacaacagggaaacagtttgcaaagtggcttggaaggagtgtggcctagggatctgctgtaagtggccagacgtagcaggagagcccagtgtcaccttctggtcctggtcagccttaacactgtggcatcctccacagcacacacggcagcctgcagtctggaaggtggacccgagcctttgcagagaggcgccgcagagccgcaggcctgcgccccagccttctgctcccgactgtgaggacacccagttctagtagagcactttttttaaagctcccattttgtaaccactagtttgcggttgacttgagtactctggtgacttcctgcgtcaagcgttctcaagctgtgagaatgtgcgcagctccaggcaggttttctctcggagagttaagtcttcccttgaaggcagggaagcaggatggatacacatatatcacacgcataaaacaccaggtgcgggagcagcccagactcaaggctgactaaactggaggctgaataccgtggaggtccacatgcagcttccctggagggcaggccggaggcgctcccgcccctgggcttgaggatgctgcaccccgtgggcttccaggcctgcccagatgatgccttcaggcctctgtccctggcggccatcctcaggccgattttgaccagcaatgatagactcttcttaaccctttcaaaataaatttttcagtgggacagaaaggagagttaaaaaacatttttttaaaggtggtaacatctgacccacaaagggaatgggtctgttttatgcaaaataaaagtttttcaaataaaaaaaaaaaaaaaaaaaaaaaaaaaaa

SEQ ID NO: 504 - protein, 2002 aa, Homo Sapiens
MEERKHETMNPAHVLFDRFVQATTCKGTLKAFQELCDHLELKPKDYRSFYHKLKSKLNYWKAKALWAKLDKRGSHKDYKKGKACTNTKCLIIGAGPCGLRTAIDLSLLGAKVVVIEKRDAFSRNNVLHLWPFTIHDLRGLGAKKFYGKFCAGAIDHISIRQLQLILLKVALILGIEIHVNVEFQGLIQPPEDQENERIGWRALVHPKTHPVSEYEFEVIIGGDGRRNTLEGFRRKEFRGKLAIAITANFINRNTTAEAKVEEISGVAFIFNQKFFQELREATGIDLENIVYYKDDTHYFVMTAKKQSLLDKGVILHDYADTELLLSRENVDQEALLSYAREAADFSTQQQLPSLDFAINHYGQPDVAMFDFTCMYASENAALVREQNGHQLLVALVGDSLLEPFWPMGTGIARGFLAAMDSAWMVRSWSLGTSPLEVLAERESIYRLLPQTTPENVSKNFSQYSIDPVTRYPNINVNFLRPSQVRHLYDTGETKDIHLEMESLVNSRTTPKLTRNESVARSSKLLGWCQRQTDGYAGVNVTDLTMSWKSGLALCAIIHRYRPDLIDFDSLDEQNVEKNNQLAFDIAEKELGISPIMTGKEMASVGEPDKLSMVMYLTQFYEMFKDSLPSSDTLDLNAEEKAVLIASTRSPISFLSKLGQTISRKRSPKDKKEKDLDGAGKRRKTSQSEEEEAPRGHRGERPTLVSTLTDRRMDVAVGNQNKVKYMATQLLAKFEENAPAQSIGIRRQGSMKKEFPQNLGGSDTCYFCQKRVYVMERLSAEGKFFHRSCFKCEYCATTLRLSAYAYDIEDGKFYCKPHYCYRLSGYAQRKRPAVAPLSGKEAKGPLQDGATTDANGRANAVASSTERTPGSGVNGLEEPSIAKRLRGTPERIELENYRLSLRQAEALQEVPEETQAEHNLSSVLDTGAEEDVASSSSESEMEEEGEEEEEEPRLPPSDLGGVPWKEAVRIHALLKGKSEEELEASKSFGPGNEEEEEEEEEYEEEEEEDYDEEEEESSEAGNQRLQQVMHAADPLEIQADVHWTHIREREEEERMAPASESSASGAPLDENDLEEDVDSEPAEIEGEAAEDGDPGDTGAELDDDQHWSDSPSDADRELRLPCPAEGEAELELRVSEDEEKLPASPKHQERGPSQATSPIRSPQESALLFIPVHSPSTEGPQLPPVPAATQEKSPEERLFPEPLLPKEKPKADAPSDLKAVHSPIRSQPVTLPEARTPVSPGSPQPQPPVAASTPPPSPLPICSQPQPSTEATVPSPTQSPIRFQPAPAKTSTPLAPLPVQSQSDTKDRLGSPLAVDEALRRSDLVEEFWMKSAEIRRSLGLTPVDRSKGPEPSFPTPAFRPVSLKSYSVEKSPQDEGLHLLKPLSIPKRLGLPKPEGEPLSLPTPRSPSDRELRSAQEERRELSSSSGLGLHGSSSNMKTLGSQSFNTSDSAMLTPPSSPPPPPPPGEEPATLRRKLREAEPNASVVPPPLPATWMRPPREPAQPPREEVRKSFVESVEEIPFADDVEDTYDDKTEDSSLQEKFFTPPSCWPRPEKPRHPPLAKENGRLPALEGTLQPQKRGLPLVSAEAKELAEERMRAREKSVKSQALRDAMARQLSRMQQMELASGAPRPRKASSAPSQGKERRPDSPTRPTLRGSEEPTLKHEATSEEVLSPPSDSGGPDGSFTSSEGSSGKSKKRSSLFSPRRNKKEKKSKGEGRPPEKPSSNLLEEAAAKPKSLWKSVFSGYKKDKKKKADDKSCPSTPSSGATVDSGKHRVLPVVRAELQLRRQLSFSEDSDLSSDDVLEKSSQKSRREPRTYTEEELNAKLTRRVQKAARRQAKQEELKRLHRAQIIQRQLQQVEERQRRLEERGVAVEKALRGEAGMGKKDDPKLMQEWFKLVQEKNAMVRYESELMIFARELELEDRQSRLQQELRERMAVEDHLKTEEELSEEKQILNEMLEVVEQRDSLVALLEEQRLREREEDKDLEAAMLSKGFSLNWS

SEQ ID NO: 505 - DNA, 1403 bp, Homo Sapiens
agttacctctcccctttcacgtagttttcatttgtggtgagattctctcccaggccacaagacatttcctgctcggaaccttgtttactaatttccactgcttttaaggccctgcactgaaaatgcaagctcaggcgccggtggtcgttgtgacccaacctggagtcggtcccggtccggccccccagaactccaactggcagacaggcatgtgtgactgtttcagcgactgcggagtctgtctctgtggcacattttgtttcccgtgccttgggtgtcaagttgcagctgatatgaatgaatgctgtctgtgtggaacaagcgtcgcaatgaggactctctacaggacccgatatggcatccctggatctatttgtgatgactatatggcaactctttgctgtcctcattgtactctttgccaaatcaagagagatatcaacagaaggagagccatgcgtactttctaaaaactgatggtgaaaagctcttaccgaagcaacaaaattcagcagacacctcttcagcttgagttcttcaccatcttttgcaactgaaatatgatggatatgcttaagtacaactgatggcatgaaaaaaatcaaatttttgatttattataaatgaatgttgtccctgaacttagctaaatggtgcaacttagtttctccttgctttcatattatcgaattcgaatttcctggcttataaactttttaaattacatttgaaatataaaccaaatgaaatattttactgataagattcttcatgcttctttgctctccttaaaatgtctttttcactagttagttccaagggtcagtctcataattttgttcttatactttgatttcctttttctttttttttttttttaatagagttgggggatctttctttctttttttttttttttttttgagatagagtctcgctctgttgcccaggctggagtgcagtggcgtgatctcagctcactgcaacctccacctcctggatacaagcgattctgctgcctcagtctcccgagtagctgggattacaggttcccgccaccatgcccagctaatttttgtatttttagtagagacggggtttcaccatcttggtcaggctggtctcgaactcctgacctcgtgatccacctgcctcggcatcacaaaatgctgggattacaggcatgagccaccgcgtccagcctagagttgggggtctttctatgttgcccaggctggtcttgaactccgggcctctagcaagcctctcatctcagcctcccaaggtgctggaattacaggtgtgagccactgcaccatactttggtttcttagcaggagattttggttcacagtaacccagctctctttcatctaagaactttagatgagaaaaaaaaaaaa

SEQ ID NO: 506 - protein, 115 aa, Homo Sapiens
MQAQAPVVVVTQPGVGPGPAPQNSNWQTGMCDCFSDCGVCLCGTFCFPCLGCQVAADMNECCLCGTSVAMRTLYRTRYGIPGSICDDYMATLCCPHCTLCQIKRDINRRRAMRTF

SEQ ID NO: 507 - DNA, 3865 bp, Homo Sapiens
acagaacacggggtgcctggaaggggaacagatgtgttgtggggcacagggcaggctgggaggggaacaaaggtccactccatgggtaaccagacccttccgccagggctggccacttctgcctttggaaaatgtttcacaacgccccatgttgtgtgtgtgtgtgaatcggccgatgtgaaccgaatgttgatgtaagaggcagggcactcggctgcggatgggtaacagggcgtgggctggcacacttacttgcaccagtgcccagagagggggtgcaggctgaggagctgcccagagcaccgctcacactcccagagtacctgaagtcggcatttcaatgacaggtgacaagggtccccaaaggctaagcgggtccagctatggttccatctccagcccgaccagcccgaccagcccagggccacagcaagcacctcccagagagacctacctgagtgagaagatccccatcccagacacaaaaccgggcaccttcagcctgcggaagctatgggccttcacggggcctggcttcctcatgagcattgctttcctggacccaggaaacatcgagtcagatcttcaggctggcgccgtggcgggattcaaacttctctgggtgctgctctgggccaccgtgttgggcttgctctgccagcgactggctgcacgtctgggcgtggtgacaggcaaggacttgggcgaggtctgccatctctactaccctaaggtgccccgcaccgtcctctggctgaccatcgagctagccattgtgggctccgacatgcaggaagtcatcggcacggccattgcattcaatctgctctcagctggacgaatcccactctggggtggcgtcctcatcaccatcgtggacaccttcttcttcctcttcctcgataactacgggctgcggaagctggaagctttttttggactccttataaccattatggccttgacctttggctatgagtatgtggtggcgcgtcctgagcagggagcgcttcttcggggcctgttcctgccctcgtgcccgggctgcggccaccccgagctgctgcaggcggtgggcattgttggcgccatcatcatgccccacaacatctacctgcactcggccctggtcaagtctcgagagatagaccgggcccgccgagcagacatcagagaagccaacatgtacttcctgattgaggccaccatcgccctgtccgtctcctttatcatcaacctctttgtcatggctgtctttgggcaggccttctaccagaaaaccaaccaggctgcgttcaacatctgtgccaacagcagcctccacgactacgccaagatcttccccatgaacaacgccaccgtggccgtggacatttaccaggggggcgtgatcctgggctgcctgttcggccccgcggccctctacatctgggccataggtctcctggcggctgggcagagctccaccatgacgggcacctacgcgggacagttcgtgatggagggcttcctgaggctgcggtggtcacgcttcgcccgtgtcctcctcacccgctcctgcgccatcctgcccaccgtgctcgtggctgtcttccgggacctgagggacttgtcgggcctcaatgatctgctcaacgtgctgcagagcctgctgctcccgttcgccgtgctgcccatcctcacgttcaccagcatgcccaccctcatgcaggagtttgccaatggcctgctgaacaaggtcgtcacctcttccatcatggtgctagtctgcgccatcaacctctacttcgtggtcagctatctgcccagcctgccccaccctgcctacttcggccttgcagccttgctggccgcagcctacctgggcctcagcacctacctggtctggacctgttgccttgcccacggagccacctttctggcccacagctcccaccaccacttcctgtatgggctccttgaagaggaccagaaaggggagacctctggctaggcccacaccagggcctggctgggagtggcatgtatgacgtgactggcctgctggatgtggagggggcgcgtgcaggcagcaggatagagtgggacagttcctgagaccagccaacctgggggctttagggacctgctgtttcctagcgcagccatgtgattaccctctgggtctcagtgtcctcatctgtaaaatggagacaccaccacccttgccatggaggttaagcactttaacacagtgtctggcacttgggacaaaaacaaacaaacgaaaaacatttcaaaaggtatttattgagcacctgcaggcgtgacctgacagcccaagggtgggtggggtgagggcttgaggacttgggcgggacacaggctccaaactggagcttgaaatagtgtctgatgaatgttaaattatctatctatctatttatttatttatttgagacagggaaagggtctccctctgttgccaaggctggagtgcagtggcgcaatcttaactcattgcaacctccaccttctgggttcaagcgattctctttattcagccccgggagtggcgcgcgccaccacgcccagctaatttgtgtattttcagcagagacggggtttgccatgctggccaggctggtctcgaactgctggattcaagtgatccgcccatctccgtctcccaaagtgctgggaattacaggcgtgagccaccaaacccggcctgattaaagttaaataaatactagttcccttctcgtccaaaggagcagggaatgggaaccgggaaggcacgaagtctctaaagcatccagaagacccctacaccagggtctggtccgctcctattcgccgcagcctttctgttccgcctgcaacccattttccagacagtaaaacggcggcgcacttctttctccgtcaggcaccaggtcataaggaacccaagagtctgtgcctctgaggcccaaattatttgctgtttcctcaggggagccggcggccgcgactcccacgccgcgccgttaccgctccctctctgctgactgctccccctaggggcagagacggtcccgacgcccgccatcccgccccggcctcacccctccccgccaggcggaacgacgcggggaggcgggcgctcggggctcgcgccaggggccccagaatccttcggggagagtgggtgggaggaagctgtgtgggcggggagccccctctgccttagggagcggctgggcacccattcgccccattcaggggctgcactttatagacgttccctaggctgtttctaggctcccccaagtccctcctccagcctcgtcgggtccctcagaccccagcccaggacctgcggagggccgcagcgaggagaggccaacaggcctttccctagagttgaacctgggccgggtgttgcacctggaagaacccccgatttcctggggacccagcagggcaggcggcctggctccgcgctcaggtccggacgcttgtttatgagaagaatttcctctttcttaaaagggcaacgatgcgagtgggtccctcaaggagagaagagatgggaccggtctggtgcgacctgggcaagcgctgcagagggtacctgggcaagagggccgcccgcctcctctgggtttggcactggagaagatgggtccatgccagctgaaggaggagatggatgggggacgtttagcgaagaaaggcatctcccagatcctttagcctcctggaagtgcccccgttgtaccccctacacacccctcttggcattgagtgccagtcctctgccaggctctgtgttacaagttggggagggcggcaaagtcccgaattaaagatgtcagttctcaaggaaaaaaaaaaaaaa

SEQ ID NO: 508 - protein, 550 aa, Homo Sapiens
MTGDKGPQRLSGSSYGSISSPTSPTSPGPQQAPPRETYLSEKIPIPDTKPGTFSLRKLWAFTGPGFLMSIAFLDPGNIESDLQAGAVAGFKLLWVLLWATVLGLLCQRLAARLGVVTGKDLGEVCHLYYPKVPRTVLWLTIELAIVGSDMQEVIGTAIAFNLLSAGRIPLWGGVLITIVDTFFFLFLDNYGLRKLEAFFGLLITIMALTFGYEYVVARPEQGALLRGLFLPSCPGCGHPELLQAVGIVGAIIMPHNIYLHSALVKSREIDRARRADIREANMYFLIEATIALSVSFIINLFVMAVFGQAFYQKTNQAAFNICANSSLHDYAKIFPMNNATVAVDIYQGGVILGCLFGPAALYIWAIGLLAAGQSSTMTGTYAGQFVMEGFLRLRWSRFARVLLTRSCAILPTVLVAVFRDLRDLSGLNDLLNVLQSLLLPFAVLPILTFTSMPTLMQEFANGLLNKVVTSSIMVLVCAINLYFVVSYLPSLPHPAYFGLAALLAAAYLGLSTYLVWTCCLAHGATFLAHSSHHHFLYGLLEEDQKGETSG

SEQ ID NO: 509 - DNA, 4107 bp, Homo Sapiens
ggtccctggtacgcggcggatgggcgccggcaggagcgggcagggcgaggcgaaggccggggagggatcgagaacggtgtgggagagctaggctcggggggcgaggccccggcccggcggggcgatggaggcgctgctctccacccccatcaaccccaacaacttccccgccaagctgtggcgcctggtgaacagcccgcgctaccgctccatccgctgggacggccgcggcgaggggctgcttatcgatcagccgctcttcgaggccgagctgctcagcccgcccgggccggggggcggtggcgggactgcgggggccggggccgagcccgagctcttcaaaaccaccagcttcaccagcttcatccgccagctcaacctctacggcttccgcaaggtggtgctgggcgggccggggggcggcaaaccggcaggcaatgggccgctccatcacttccacaacccgcacttccgccgcgaccagccacagctgctcgtgcacctcaagcgcctcaccagcgccaacaaggccaagctggcggccggcctggaggtgccctgccgcccgcccaaccgcttccagcggctgctcatcacctcggcctccgccgccaccgcgccactgcagcaccagcagccgccgccgcccgcggggccccggcccgagccgcacggaccagtggctgtaggacaatttcaccggtcatttcgtcgagatagtttgtctccttactcctgtgtatcaactccatcccacgaccacagtacttaccctctgaaaggtttagatcggaccccagttcctcatagaatatggcagaactcccttggaatgcatcctggacaagtggagacatctcccacattttcagataaaggggttccgtttcctgtactccagaggtttccaactgaggttacctatacactgcagcccagcaccacatctgtacatgttcaacaaggtcctcaaacaatggtcagctcctcccaaaaatacagtaactacacaccctcagcacagtactcgcaagcctactatccaacagctgtgctacagtgctgttctcctacccacatggatgctctaagtagttgtgtcactcccaatgcctcttcctatgcacactgcaactacttccagaatccttcaatgcagtcctcctatccagttgaatttttgccttccaattggccctgcagtactactgatgaaaatacaaagacagaagtaaacctagaggctgtctttcagatagttgatgagttgcattcctcccctaaattggagatggtaaaggtggagcctgttgagaatcagtgcccaacatctccgtcttacagaggccaacacattttagctaattctaacaacagcaatccatgttctgcaagtcaggctagccagctggagccacttactcctgtaggctcagatattatgtcttttgtggttggaacagaacaagcagttgcctgctctctaccacagtcacctgagtacatctataccatccacacagctcagcctgttgaaaatagcacaatacaggaatctgcagccatccagcaagctcatgtcaaactgaaggagcacctaaatcataatccatctccatcttcagtagtatttgtgcaggaagggccaccattcagcacacaccaggtggatgccaacataaaatgccagaccagttcacgtgagaatatcttgccgtcagaacagatgggattcctcatttcagaaatggggcctgctagcaagcctagtgaagacacaggtttagccactccagccagatacagagagcacagaagcaactcacaacaaggaaagtcccctgatcttcatctgctggtggacgtggcctgcaagcaggagcgctttccaaaggaggaagaattaaaagagtgaggaatggatgacaaatgtgacattgtgcactagctgtagctggaggcagactagccttgcacatgacaaactgttgggattttttcagttctgttaaggaaaaaaaagtattttttgtttcgttaattgagaattttgttaattgagaattgggaatttgtatgtactacagtggttcagttcagattatctgccttgacaaactactgaacatctagcagccacgttttttggctgcccagatcccttttaaatgaaaagttctgaccttctgttatagtcaaggagcatctaaaaactgctccatctatggtactaagaataatctgtgtgtgtgctgatttgttgtcttgccactcaaactgtagtcagcacaactttagtggggaattcagtctctctgattcaagtcacagtgtgatccttttagaggagattgtgtgagaaacaaaggcatgtgaggtcaccagcatcacaggtctaaatgcatcaggaattccagggaagaaactctggagaagagctaattttctaagtgattaaccaggaaattctcttacttcctaacccagcattctgttttaagagcaaggcatccggacttggaccatctatcacacttaacagcccctgattcttttatattaatggaagcattcttctattttcatatctttctttaattttaatgatacattatcataaatggtaaaaagattttattaatatatcacttatttaaatgtctttaaagaaagtatttaacttgtttaatataattgtatttataaatgctgatagatttaaaggttttaaagttttatatttttattattgcaggatagaaggataaaggatgcatgtgtagtatttttattttgaaaggaaaatgtacaatgtgtgaacaaaaacattaagagatttaatatactattttcttattttagatttttacattcaataagtataaattctcatctatataaggtattgtgtgcaaatttgggaaaaaactgattagcagccatttagtagaagctatgcctctgatttttaaagaatggtttcaatctggtttaagcttctgagagaattttggataatgggatagatggtaacatttttttcttatccctgttacaggattctagatttgtgcagtaggattgtgggactgtgttttaggagagaaggatgtcttggatgtccagtttctgtggttaatcccttacttgcttatccagtgacagcaagaaactttctgatttaaagtctttcaattgaccaaaactttcttattggattctgtttcagttctcctattaagcactgcagaaacgaaaggaaagcctaggaatatgaaactaattaaaaaggcacttggtgatatgacatagtactatgctagccgttgtggatgtaacagttcatttcttatactgcattgtgccttcccaatgatgtcaaaccctagaaatattacagagatctacttttctggaaaagggtgagctctgtattgatctgcagtgactctgtttagatattaaagtaggttctgaaaagcgacctgtgtggtccctctgattagactagttaatgtctatgtgatgggcatttatttatctttattagcaaggtttaaaagagcaaattatcaagacacctatatcttttggccagactatataatattttgtcagagtatgtgaagaggagacccaatttccaaatgaaggaactttgctttttctctgtcatgttgaagagctaatatactgtgtagattttcccctaaatatggctttcttagctttatagatgttgagataatatcttttgaggaacacatgtcaagcaggaaccttggcatagatttggtttcagttgttttaaggcttaattaatgaaatgccttaatcagctttccaaacatttttatatatgaatacagcagaccaaggagctggatctcctgctatccttacacgccttgtatctatcaactaaagctgtcattaatgacttgggcaaaatggcaagaggtataataaagtcttcctgtgaattagccagtagggtctgacacaactagtcaactaacaaggttcctgactagtacctcagtatttcagcaccttaagcactgataaatttcaatcagtcaacaataaagtgagtgttccaactag

SEQ ID NO: 510 - protein, 596 aa, Homo Sapiens
MEALLSTPINPNNFPAKLWRLVNSPRYRSIRWDGRGEGLLIDQPLFEAELLSPPGPGGGGGTAGAGAEPELFKTTSFTSFIRQLNLYGFRKVVLGGPGGGKPAGNGPLHHFHNPHFRRDQPQLLVHLKRLTSANKAKLAAGLEVPCRPPNRFQRLLITSASAATAPLQHQQPPPPAGPRPEPHGPVAVGQFHRSFRRDSLSPYSCVSTPSHDHSTYPLKGLDRTPVPHRIWQNSLGMHPGQVETSPTFSDKGVPFPVLQRFPTEVTYTLQPSTTSVHVQQGPQTMVSSSQKYSNYTPSAQYSQAYYPTAVLQCCSPTHMDALSSCVTPNASSYAHCNYFQNPSMQSSYPVEFLPSNWPCSTTDENTKTEVNLEAVFQIVDELHSSPKLEMVKVEPVENQCPTSPSYRGQHILANSNNSNPCSASQASQLEPLTPVGSDIMSFVVGTEQAVACSLPQSPEYIYTIHTAQPVENSTIQESAAIQQAHVKLKEHLNHNPSPSSVVFVQEGPPFSTHQVDANIKCQTSSRENILPSEQMGFLISEMGPASKPSEDTGLATPARYREHRSNSQQGKSPDLHLLVDVACKQERFPKEEELKE

SEQ ID NO: 511 - DNA, 2974 bp, Homo Sapiens
agaagccccgcagccgccgcgcggagaacagcgacagccgagcgcccggtccgcctgtctgccggtgggtctgcctgcccgcgcagcagacccggggcggccgcgggagcccgcgccccgcccgccgcgcctctgccgggacccacccgcagcggagggctgagcccgccggcggctccccggagctcacccacctccgcgcgccggagcgcaggcaaaaggggaggaaaggctcctctctttagtcaccactctcgccctctccaagaatttgtttaacaaagcgctgaggaaagagaacgtcttcttgaattctttagtaggggcggagtctgctgctgccctgcgctgccacctcggctacactgccctccgcgacgacccctgaccagccggggtcacgtccgggagacgggatcatgaagcgctcggtagccgtctggctcttggtcgggctcagcctcggtgtcccccagttcggcaaaggtgatatttgtgatcccaatccatgtgaaaatggaggtatctgtttgccaggattggctgatggttccttttcctgtgagtgtccagatggcttcacagaccccaactgttctagtgttgtggaggttgcatcagatgaagaagaaccaacttcagcaggtccctgcactcctaatccatgccataatggaggaacctgtgaaataagtgaagcataccgaggggatacattcataggctatgtttgtaaatgtccccgaggatttaatgggattcactgtcagcacaacataaatgaatgcgaagttgagccttgcaaaaatggtggaatatgtacagatcttgttgctaactattcctgtgagtgcccaggcgaatttatgggaagaaattgtcaatacaaatgctcaggcccactgggaattgaaggtggaattatatcaaaccagcaaatcacagcttcctctactcaccgagctctttttggactccaaaaatggtatccctactatgcacgtcttaataagaaggggcttataaatgcgtggacagctgcagaaaatgacagatggccgtggattcagataaatttgcaaaggaaaatgagagttactggtgtgattacccaaggagccaagaggattggaagcccagagtatataaaatcctacaaaattgcctacagtaatgatggaaagacttgggcaatgtacaaagtgaaaggcaccaatgaagacatggtgtttcgtggaaacattgataacaacactccatatgctaactctttcacaccccccataaaagctcagtatgtaagactctatccccaagtttgtcgaagacattgcactttgcgaatggaacttcttggctgtgaactgtcgggttgttctgagcctctgggtatgaaatcaggacatatacaagactatcagatcactgcctccagcatcttcagaacgctcaacatggacatgttcacttgggaaccaaggaaagctcggctggacaagcaaggcaaagtgaatgcctggacctctggccacaatgaccagtcacaatggttacaggtggatcttcttgttccaaccaaagtgactggcatcattacacaaggagctaaagattttggtcatgtacagtttgttggctcctacaaactggcttacagcaatgatggagaacactggactgtataccaggatgaaaagcaaagaaaagataaggttttccagggaaattttgacaatgacactcacagaaaaaatgtcatcgaccctcccatctatgcacgacacataagaatccttccttggtcctggtacgggaggatcacattgcggtcagagctgctgggctgcacagaggaggaatgaggggaggctacatttcacaaccctcttccctatttccctaaaagtatctccatggaatgaactgtgcaaaatctgtaggaaactgaatggtttttttttttttttcatgaaaaagtgctcaaattatggtaggcaactaacggtgtttttaagggggtctaagcctgccttttcaatgatttaatttgattttattttatccgtcaaatctcttaagtaacaacacattaagtgtgaattacttttctctcattgtttcctgaattattcgcattggtagaaatatattagggaaagaaagtagccttctttttatagcaagagtaaaaaagtctcaaagtcatcaaataagagcaagagttgatagagcttttacaatcaatactcacctaattctgataaaaggaatactgcaatgttagcaataagtttttttcttctgtaatgactctacgttatcctgtttccctgtgcctaccaaacactgtcaatgtttattacaaaattttaaagaagaatatgtaacatgcagtactgatattataattctcattttactttcattatttctaataagagattatgtgacttctttttcttttagttctattctacattcttaatattgtatattacctgaataattcaatttttttctaattgaatttcctattagttgactaaaagaagtgtcatgtttactcatatatgtagaacatgactgcctatcagtagattgatctgtatttaatattcgttaattaaatctgcagttttatttttgaaggaagccataactatttaatttccaaataattgcttcataaagaatcccatactctcagtttgcacaaaagaacaaaaaatatatatgtctctttaaatttaaatcttcatttagatggtaattacatatccttatatttactttaaaaaatcggcttatttgtttattttataaaaaatttagcaaagaaatattaatatagtgctgcatagtttggccaagcatactcatcatttctttgttcagctccacatttcctgtgaaactaacatcttattgagatttgaaactggtggtagtttcccaggaaggcacaggtggagtt

SEQ ID NO: 512 - protein, 480 aa, Homo Sapiens
MKRSVAVWLLVGLSLGVPQFGKGDICDPNPCENGGICLPGLADGSFSCECPDGFTDPNCSSVVEVASDEEEPTSAGPCTPNPCHNGGTCEISEAYRGDTFIGYVCKCPRGFNGIHCQHNINECEVEPCKNGGICTDLVANYSCECPGEFMGRNCQYKCSGPLGIEGGIISNQQITASSTHRALFGLQKWYPYYARLNKKGLINAWTAAENDRWPWIQINLQRKMRVTGVITQGAKRIGSPEYIKSYKIAYSNDGKTWAMYKVKGTNEDMVFRGNIDNNTPYANSFTPPIKAQYVRLYPQVCRRHCTLRMELLGCELSGCSEPLGMKSGHIQDYQITASSIFRTLNMDMFTWEPRKARLDKQGKVNAWTSGHNDQSQWLQVDLLVPTKVTGIITQGAKDFGHVQFVGSYKLAYSNDGEHWTVYQDEKQRKDKVFQGNFDNDTHRKNVIDPPIYARHIRILPWSWYGRITLRSELLGCTEEE

SEQ ID NO: 513 - DNA, 3076 bp, Homo Sapiens
acggcgcaggctccgcggcccgagcaggcgcgtcagccgagctcggcggtggcgcgggcggctgggacgcagctgcccccgctcggcgcccgctgcacccttagcagccactgccacctgggcccggagcctccacgatctcgcccggcgattgtgggcaggggcgcctccggatcgatcttctgaaattcaagttttcaagatgaagtttttattgacaactgcctttttaattttaatttccttgtgggtggaagaagcctattctaaggaaaagtcttcaaagaaagggaaggggaaaaagaagcagtatctatgcccatctcagcagtcagcagaggaccttgcccgagtacctgccaactccactagcaatatcttgaacaggttattggtcagttatgatcccaggataagaccaaacttcaaaggcattcctgttgatgtagtagtcaacatttttattaacagttttggatccattcaagaaacaacaatggactatagagttaacatcttcctgagacaaaaatggaatgaccccaggctgaagctccccagtgattttaggggttcagatgcactgacagtggatccaacaatgtacaagtgtttatggaaacctgatttattttttgcaaatgaaaaaagtgccaattttcatgatgtgacccaggaaaacatcctcctctttatttttcgtgatggagatgtccttgtcagcatgaggttatctattactctttcatgccctttggacttgacattgtttcccatggatacacaacgttgcaagatgcaactggagagctttggttacacaactgatgatttacgatttatctggcagtcaggagatcctgtgcaattagaaaaaattgccttgcctcaatttgatatcaaaaaggaagatattgaatatggtaactgtacaaaatactataaaggcacgggctactacacatgcgtggaagtcatcttcaccctgaggaggcaggtcggcttttacatgatgggggtctacgccccaaccctgctcattgttgttctctcctggctttccttctggatcaacccggacgcgagtgctgccagagtgcccctgggtatcttctcagtcctcagcttggcctctgagtgcacaacccttgccgctgagcttcccaaagtttcctatgtgaaggctcttgatgtttggcttattgcttgccttctctttgggtttgcttccctggtggagtatgcagttgtccaggtgatgctgaacaaccccaaaagggttgaagctgaaaaagccagaattgctaaggctgagcaagcagatggaaaaggtggaaatgtggctaaaaagaatactgtgaatggaacagggactcctgttcatattagcactttgcaggttggtgagaccagatgcaaaaaagtttgtacttctaagtctgatctgagatctaatgacttcagcattgttggaagcttaccaagagattttgaactatccaattatgactgctatggaaaacccattgaagttaacaacggacttgggaaatctcaggctaagaacaacaagaagcctccccctgcgaaacctgttattccaacagcagcaaagcgaattgatctttatgcaagagcattgtttcctttctgcttcttgttcttcaatgttatatattggtctatatatttatgataaatcttttccatttgtacaaaataaaattccatttcattgtgacctactcctttcataaatgccaatctgtgagaacttttgaattttcatagcaacattgcattttggatgccatttgattgtaataaaactgtggcaccttaattttgaatggcagcatgatcatgtaatatctgtgctctaataacgatgtatatatgtatagtgaacatattgcttagtaacaaatgaaggacaagcatactacataatataatccatacaattctcttcagttagtgtaaactgcaaatactacagataattctgataataaaatgatatgcacgctgaatcctgctatggtcaccattctaatgtatgtagtatttcaaatttccttccttgtaactttcaaagaaagccatcttattcttgtaaaattttagatggtattatcacagatttaaaaaggttgtattacatattgtttaaactttgtaagtagaaatatatctgttataattatacaggctctgtggagaaataaagttcaaaatatattaatttgtaaaatcagctcgttttaaagtgtgcttgtgttgtcaaaaatatcagatagtaatacacagtgagcatttttaaacaaagggaaacctatatttatgtaactgtatactgaattctgacaaaataaaaaaagataccttattgacgaaatatttaggataaacaaaattctatttaatccaccttaaaacctaaatgtattttcatggatttcatttgttggtacatattacacaaaacattgtgccttaaaatgagtcatacatcttttaaattggaatgcagtaatagatatgtgattttacatcatttttaagaaaccaaggggaagtaataagttgaaaaagaaatccataactattaaaagattttaacttttttattttattaaaatgcttgcatattttaagtaaaattaaaaatgtttactgaatttatttttttatttgaatattttgggattagttacaaaatatttagagattaaataaataatagctttgtttgtgttagacttcacttctacttgtattttctttcttgttaaaagtctagacaactgagatttacttactttgaacttgttccaatccaaaagtaagcactaagtctcattttatgagaccaccatttcttaatatcacatccagtgcacctttgtctttctgccatatctgaaataaaactatcagtaattcacatagataaacataagactaaagaagtatatttacattatctggagagttttgttgcagctacgagtttgtatggcaaattcaataataaagtattgtttatgcaaattgcaaaaaaaaaaaaaaaaaa

SEQ ID NO: 514 - protein, 497 aa, Homo Sapiens
MKFLLTTAFLILISLWVEEAYSKEKSSKKGKGKKKQYLCPSQQSAEDLARVPANSTSNILNRLLVSYDPRIRPNFKGIPVDVVVNIFINSFGSIQETTMDYRVNIFLRQKWNDPRLKLPSDFRGSDALTVDPTMYKCLWKPDLFFANEKSANFHDVTQENILLFIFRDGDVLVSMRLSITLSCPLDLTLFPMDTQRCKMQLESFGYTTDDLRFIWQSGDPVQLEKIALPQFDIKKEDIEYGNCTKYYKGTGYYTCVEVIFTLRRQVGFYMMGVYAPTLLIVVLSWLSFWINPDASAARVPLGIFSVLSLASECTTLAAELPKVSYVKALDVWLIACLLFGFASLVEYAVVQVMLNNPKRVEAEKARIAKAEQADGKGGNVAKKNTVNGTGTPVHISTLQVGETRCKKVCTSKSDLRSNDFSIVGSLPRDFELSNYDCYGKPIEVNNGLGKSQAKNNKKPPPAKPVIPTAAKRIDLYARALFPFCFLFFNVIYWSIYL

SEQ ID NO: 515 - DNA, 3657 bp, Homo Sapiens
agtcgcctcccagatgagcactctctcagaccgctgcgggccgccaggcgccgggaatgtcccctgaatgcgcgcgggcagcgggcgacgcgcccttgcgcagcctggagcaagccaaccgcacccgctttcccttcttctccgacgtcaagggcgaccaccggctggtgctggccgcggtggagacaaccgtgctggtgctcatctttgcagtgtcgctgctgggcaacgtgtgcgccctggtgctggtggcgcgccgacgacgccgcggcgcgactgcctgcctggtactcaacctcttctgcgcggacctgctcttcatcagcgctatccctctggtgctggccgtgcgctggactgaggcctggctgctgggccccgttgcctgccacctgctcttctacgtgatgaccctgagcggcagcgtcaccatcctcacgctggccgcggtcagcctggagcgcatggtgtgcatcgtgcacctgcagcgcggcgtgcggggtcctgggcggcgggcgcgggcagtgctgctggcgctcatctggggctattcggcggtcgccgctctgcctctctgcgtcttcttccgagtcgtcccgcaacggctccccggcgccgaccaggaaatttcgatttgcacactgatttggcccaccattcctggagagatctcgtgggatgtctcttttgttactttgaacttcttggtgccaggactggtcattgtgatcagttactccaaaattttacagacctcggaacacctcctggatgcaagagctgtcgtgactcacagtgagatcacaaaggcatcaaggaagaggctcacggtaagcctggcctactcggagagccaccagatccgcgtgtcccagcaggacttccggctcttccgcaccctcttcctcctcatggtctccttcttcatcatgtggagccccatcatcatcaccatcctcctcatcctgatccagaacttcaagcaagacctggtcatctggccgtccctcttcttctgggtggtggccttcacatttgctaattcagccctaaaccccatcctctacaacatgacactgtgcaggaatgagtggaagaaaattttttgctgcttctggttcccagaaaagggagccattttaacagacacatctgtcaaaagaaatgacttgtcgattatttctggctaatttttctttatagccgagtttctcacacctggcgagctgtggcatgcttttaaacagagttcatttccagtaccctccatcagtgcaccctgctttaagaaaatgaacctatgcaaatagacatccacagcgtcggtaaattaaggggtgatcaccaagtttcataatattttccctttataaaaggatttgttggccaggtgcagtggttcatgcctgtaatcccagcagtttgggaggctgaggtgggtggatcacctgaggtcaggagttcgagaccaacctgaccaacatggtgagacccccgtctctactaaaaataaaaaaaaaaattagctgggagtggtggtgggcacctgtaatcctagctacttgggaggctgaaccaggagaatctcttgaacctgggaggcagaggttgcagtgagccgagatcgtgccattgcactccaaccagggcaacaagagtgaaactccatcttaaaaaaaaaaaaaaaaagatttgttatgggttccttttaaatgtgaacttttttagtgtgtttgtaatatgatcaaatttaataaatatttatttatgactgttcagcaatcacatctcctacatataaagccacaccatagtggtttctgaagtgagtcttagaaccgattcaggacgcagatttctcctctgaagggtcacagccaccctgtgccctaccttggactcgcaagggtttaggatcattcgttgatgtcaagagcaattgaagaatttctaaggaacagttaaagatgacttacttttttttttttttcatttataaaaatgctatggacccttttaagagaatcggcatcatgaaatgagagagaaagtaggatggctctgaaatgtttgagagtgagttcaggagtggtttactcctgacgcatccagcagagatgcctcttaagcaccagccatggcagacagtgtcctttgtgctaggaatacagtggtgaaccagacagccatggccctctctcagggaacttaccttcgagtcaggggcagaaaaactaaataaaagtcaataaactatatctatatacagatacctatatatttgagatgagggtcttgctccaatgcccaggctggagtgcaacggcacaatcacggctccctgaagcctcaaatgccttggctcaagcaatcctcccgcctcagcctcccaagtagctgggattacaggcgtgagccgccacgcctggctacaagtcaataaatagtatagcatcacagagcgaataagcactgtgaagaaaatgggacgggggctatggtagtgatgggaatttagatcagatggggaggggcctaaggagacctttctgaggagtgacaaattggatcaaaaggtaagcgacaagaaagggccacctgtgtgaatgggggaagggacacagaagagatgttagtgcaaggaggctgacacgcttgaagggagagtggcgtaagccgactattgatggagcctcctctgcactaggcactgcctttaatgctgagatgaggggtacccggctggggcctgtcagttgaggccagagaaattgcagggttagatcacatagggcctaggagtttattctgttctccaagcccctggaggttggcaactggaggctgacgtgacctgatgaatgtgtgcaaagattaccctggctgctgggcagggaatagactctgaggagcatgagtgaaaatggagaccagttgggcagctgctgaagtgtgacatggggatgggaccttggaggtgagtggcattagggagggattgtgagaaatgacttgtaaatataccttgggaaggtaaaacaaagatgatttattgatgggaaggatggaattgatagaatgtgagggaaagggagaactcaaggggaatactctgattttttagcctgtcattggttggatggtgaagcaggcaacaaaaatgggggggcctgggcaaagattaggggggggggagccaagagtttcatttggagctcatcagtttgaaatctcagtgagacttccaaattgaataggcagttggatgcagagatgtggagcttgggcctggagatgcacattgtttggagatataaatggtgtttatagacctatggttttataatacatcccttggagagatagagagaaaccagagccaaagaccgaacccagggtcactccaccacttggaggctgggccagtggctggaatgcacagcagcacggggcctggtgtatagtaggtgttcaacaaatctttgttgctgaggaaatcagcaccagcagtagtgactgcttatgcagtttctggagcagcttgcttctgaagtcagattcatggatatcacaagctcgaagacaaacgaacagagatgttttgctcactttagttaatagatttgatcaattaaacctgtttttggaagtgaaaaa

SEQ ID NO: 516 - protein, 377 aa, Homo Sapiens
MSPECARAAGDAPLRSLEQANRTRFPFFSDVKGDHRLVLAAVETTVLVLIFAVSLLGNVCALVLVARRRRRGATACLVLNLFCADLLFISAIPLVLAVRWTEAWLLGPVACHLLFYVMTLSGSVTILTLAAVSLERMVCIVHLQRGVRGPGRRARAVLLALIWGYSAVAALPLCVFFRVVPQRLPGADQEISICTLIWPTIPGEISWDVSFVTLNFLVPGLVIVISYSKILQTSEHLLDARAVVTHSEITKASRKRLTVSLAYSESHQIRVSQQDFRLFRTLFLLMVSFFIMWSPIIITILLILIQNFKQDLVIWPSLFFWVVAFTFANSALNPILYNMTLCRNEWKKIFCCFWFPEKGAILTDTSVKRNDLSIISG

SEQ ID NO: 517 - DNA, 3161 bp, Homo Sapiens
actgaaaacccagcgttagtagaaaagtttcttttctttgaatgacagaactacagcataatgcgtggcttcaacctgctcctcttctggggatgttgtgttatgcacagctgggaagggcacataagacccacacggaaaccaaacacaaagggtaataactgtagagacagtaccttgtgcccagcttatgccacctgcaccaatacagtggacagttactattgcgcttgcaaacaaggcttcctgtccagcaatgggcaaaatcacttcaaggatccaggagtgcgatgcaaagatattgatgaatgttctcaaagcccccagccctgtggtcctaactcatcctgcaaaaacctgtcagggaggtacaagtgcagctgtttagatggtttctcttctcccactggaaatgactgggtcccaggaaagccgggcaatttctcctgtactgatatcaatgagtgcctcaccagcagcgtctgccctgagcattctgactgtgtcaactccatgggaagctacagttgcagctgtcaagttggattcatctctagaaactccacctgtgaagacgtggatgaatgtgcagatccaagagcttgcccagagcatgcaacttgtaataacactgttggaaactactcttgtttctgcaacccaggatttgaatccagcagtggccacttgagtttccagggtctcaaagcatcgtgtgaagatattgatgaatgcactgaaatgtgccccatcaattcaacatgcaccaacactcctgggagctacttttgcacctgccaccctggctttgcaccaagcaatggacagttgaatttcacagaccaaggagtggaatgtagagatattgatgagtgccgccaagatccatcaacctgtggtcctaattctatctgcaccaatgccctgggctcctacagctgtggctgcattgcaggctttcatcccaatccagaaggctcccagaaagatggcaacttcagctgccaaagggttctcttcaaatgtaaggaagatgtgatacccgataataagcagatccagcaatgccaagagggaaccgcagtgaaacctgcatatgtctccttttgtgcacaaataaataacatcttcagcgttctggacaaagtgtgtgaaaataaaacgaccgtagtttctctgaagaatacaactgagagctttgtccctgtgcttaaacaaatatccacgtggactaaattcaccaaggaagagacgtcctccctggccacagtcttcctggagagtgtggaaagcatgacactggcatctttttggaaaccctcagcaaatatcactccggctgttcggacggaatacttagacattgagagcaaagttatcaacaaagaatgcagtgaagagaatgtgacgttggacttggtagccaagggggataagatgaagatcgggtgttccacaattgaggaatctgaatccacagagaccactggtgtggcttttgtctcctttgtgggcatggaatcggttttaaatgagcgcttcttcaaagaccaccaggctcccttgaccacctctgagatcaagctgaagatgaattctcgagtcgttgggggcataatgactggagagaagaaagacggcttctcagatccaatcatctacactctggagaacattcagccaaagcagaagtttgagaggcccatctgtgtttcctggagcactgatgtgaagggtggaagatggacatcctttggctgtgtgatcctggaagcttctgagacatataccatctgcagctgtaatcagatggcaaatcttgccgttatcatggcgtctggggagctcacgatggacttttccttgtacatcattagccatgtaggcattatcatctccttggtgtgcctcgtcttggccatcgccacctttctgctgtgtcgctccatccgaaatcacaacacctacctccacctgcacctctgcgtgtgtctcctcttggcgaagactctcttcctcgccggtatacacaagactgacaacaagatgggctgcgccatcatcgcgggcttcctgcactaccttttccttgcctgcttcttctggatgctggtggaggctgtgatactgttcttgatggtcagaaacctgaaggtggtgaattacttcagctctcgcaacatcaagatgctgcacatctgtgcctttggttatgggctgccgatgctggtggtggtgatctctgccagtgtgcagccacagggctatggaatgcataatcgctgctggctgaatacagagacagggttcatctggagtttcttggggccagtttgcacagttatagtgatcaactcccttctcctgacctggaccttgtggatcctgaggcagaggctttccagtgttaatgccgaagtctcaacgctaaaagacaccaggttactgaccttcaaggcctttgcccagctcttcatcctgggctgctcctgggtgctgggcatttttcagattggacctgtggcaggtgtcatggcttacctgttcaccatcatcaacagcctgcagggggccttcatcttcctcatccactgtctgctcaacggccaggtacgagaagaatacaagaggtggatcactgggaagacgaagcccagctcccagtcccagacctcaaggatcttgctgtcctccatgccatccgcttccaagacgggttaaagtcctttcttgctttcaaatatgctatggagccacagttgaggacagtagtttcctgcaggagcctaccctgaaatctcttctcagcttaacatggaaatgaggatcccaccagccccagaaccctctggggaagaatgttgggggcggtcttcctgtggttgtatgcactgatgagaaatcaggcgtttctgctccaaacgaccattttatcttcgtgctctgcaacttcttcaattccagagtttctgagaacagacccaaattcaatggcatgaccaagaacacctggctaccattttgttttctcctgcccttgttggtgcatggttctaagcatgcccctccagagcctatcatacgcctgatacagagaacctctcaataaatgatttgtcgcctgtctgactgatttaccctaggaaaaaaaaaaaaaaaaa

SEQ ID NO: 518 - protein, 886 aa, Homo Sapiens
MRGFNLLLFWGCCVMHSWEGHIRPTRKPNTKGNNCRDSTLCPAYATCTNTVDSYYCACKQGFLSSNGQNHFKDPGVRCKDIDECSQSPQPCGPNSSCKNLSGRYKCSCLDGFSSPTGNDWVPGKPGNFSCTDINECLTSSVCPEHSDCVNSMGSYSCSCQVGFISRNSTCEDVDECADPRACPEHATCNNTVGNYSCFCNPGFESSSGHLSFQGLKASCEDIDECTEMCPINSTCTNTPGSYFCTCHPGFAPSNGQLNFTDQGVECRDIDECRQDPSTCGPNSICTNALGSYSCGCIAGFHPNPEGSQKDGNFSCQRVLFKCKEDVIPDNKQIQQCQEGTAVKPAYVSFCAQINNIFSVLDKVCENKTTVVSLKNTTESFVPVLKQISTWTKFTKEETSSLATVFLESVESMTLASFWKPSANITPAVRTEYLDIESKVINKECSEENVTLDLVAKGDKMKIGCSTIEESESTETTGVAFVSFVGMESVLNERFFKDHQAPLTTSEIKLKMNSRVVGGIMTGEKKDGFSDPIIYTLENIQPKQKFERPICVSWSTDVKGGRWTSFGCVILEASETYTICSCNQMANLAVIMASGELTMDFSLYIISHVGIIISLVCLVLAIATFLLCRSIRNHNTYLHLHLCVCLLLAKTLFLAGIHKTDNKMGCAIIAGFLHYLFLACFFWMLVEAVILFLMVRNLKVVNYFSSRNIKMLHICAFGYGLPMLVVVISASVQPQGYGMHNRCWLNTETGFIWSFLGPVCTVIVINSLLLTWTLWILRQRLSSVNAEVSTLKDTRLLTFKAFAQLFILGCSWVLGIFQIGPVAGVMAYLFTIINSLQGAFIFLIHCLLNGQVREEYKRWITGKTKPSSQSQTSRILLSSMPSASKTG

SEQ ID NO: 519 - DNA, 1867 bp, Homo Sapiens
cacatagctcagttcccataaaagggctggtttgccgcgtcggggagtggagtgggacaggtatataaaggaagtacagggcctggggaagaggccctgtctaggtagctggcaccaggagccgtgggcaagggaagaggccacaccctgccctgctctgctgcagccagaatgggtgtgaaggcgtctcaaacaggctttgtggtcctggtgctgctccagtgctgctctgcatacaaactggtctgctactacaccagctggtcccagtaccgggaaggcgatgggagctgcttcccagatgcccttgaccgcttcctctgtacccacatcatctacagctttgccaatataagcaacgatcacatcgacacctgggagtggaatgatgtgacgctctacggcatgctcaacacactcaagaacaggaaccccaacctgaagactctcttgtctgtcggaggatggaactttgggtctcaaagattttccaagatagcctccaacacccagagtcgccggactttcatcaagtcagtaccgccatttctgcgcacccatggctttgatgggctggaccttgcctggctctaccctggacggagagacaaacagcattttaccaccctaatcaaggaaatgaaggccgaatttataaaggaagcccagccagggaaaaagcagctcctgctcagcgcagcactgtctgcggggaaggtcaccattgacagcagctatgacattgccaagatatcccaacacctggatttcattagcatcatgacctacgattttcatggagcctggcgtgggaccacaggccatcacagtcccctgttccgaggtcaggaggatgcaagtcctgacagattcagcaacactgactatgctgtggggtacatgttgaggctgggggctcctgccagtaagctggtgatgggcatccccaccttcgggaggagcttcactctggcttcttctgagactggtgttggagccccaatctcaggaccgggaattccaggccggttcaccaaggaggcagggacccttgcctactatgagatctgtgacttcctccgcggagccacagtccatagaatcctcggccagcaggtcccctatgccaccaagggcaaccagtgggtaggatacgacgaccaggaaagcgtcaaaagcaaggtgcagtacctgaaggacaggcagctggcgggcgccatggtatgggccctggacctggatgacttccagggctccttctgcggccaggatctgcgcttccctctcaccaatgccatcaaggatgcactcgctgcaacgtagccctctgttctgcacacagcacgggggccaaggatgccccgtccccctctggctccagctggccgggagcctgatcacctgccctgctgagtcccaggctgagcctcagtctccctcccttggggcctatgcagaggtccacaacacacagatttgagctcagccctggtgggcagagaggtagggatggggctgtggggatagtgaggcatcgcaatgtaagactcgggattagtacacacttgttgattaatggaaatgtttacagatccccaagcctggcaagggaatttcttcaactccctgccccccagccctccttatcaaaggacaccattttggcaagctctatcaccaaggagccaaacatcctacaagacacagtgaccatactaattataccccctgcaaagcccagcttgaaaccttcacttaggaacgtaatcgtgtcccctatcctacttccccttcctaattccacagctgctcaataaagtacaagagcttaacagtgaaaaaaaaaaaaaaaaaaaaaaaaaaaaaa

SEQ ID NO: 520 - protein, 383 aa, Homo Sapiens
MGVKASQTGFVVLVLLQCCSAYKLVCYYTSWSQYREGDGSCFPDALDRFLCTHIIYSFANISNDHIDTWEWNDVTLYGMLNTLKNRNPNLKTLLSVGGWNFGSQRFSKIASNTQSRRTFIKSVPPFLRTHGFDGLDLAWLYPGRRDKQHFTTLIKEMKAEFIKEAQPGKKQLLLSAALSAGKVTIDSSYDIAKISQHLDFISIMTYDFHGAWRGTTGHHSPLFRGQEDASPDRFSNTDYAVGYMLRLGAPASKLVMGIPTFGRSFTLASSETGVGAPISGPGIPGRFTKEAGTLAYYEICDFLRGATVHRILGQQVPYATKGNQWVGYDDQESVKSKVQYLKDRQLAGAMVWALDLDDFQGSFCGQDLRFPLTNAIKDALAAT

SEQ ID NO: 521 - DNA, 3327 bp, Homo Sapiens
ggaagaggaggggggagaaggaggagctgaagcgggaagagcggcaggcagcggctcggcggagttgcagcagaggcggcggcgacgctgagacaccgcagcttccctgagcgccgagtccctccggggacagcagcagggagcgcccgcgcagccaccgagcctctgcccagccaagccgccgtcgccgcgccgggggaccgccagccatggccgcgccgggggatccgcaggacgagctgctgccgctggccggccccgggtcccagtggctcaggcaccggggggagggggagaacgaagcggtgacgccgaaaggggccacgccggcgccgcaggctggggagcccagcccggggttgggcgccagggcccgggaagcggcgtcgcgggaagccggctcgggccccgcccggcagtcgcccgttgccatggaaactgcatccacaggtgtggcaggtgtttccagtgccatggaccacaccttctcaacaacatcaaaagatggggaaggatcgtgttacacatctctcatttctgacatctgctatccacctcaggaggattctacatattttactggaattcttcagaaggaaaatggccacgtcaccatttcagagagccctgaggagctgggtacacccggcccctccttaccagatgtgcctgggatagagtctcgtggcttatttagttctgattctggaatagagatgactcctgcagagtccacggaagtgaacaagatcttagcagaccctctggaccagatgaaagcagaggcctataaatacattgacataaccagacccgaggaggtgaagcaccaagaacaacatcaccccgagctggaagataaagacttggactttaagaataaagacactgacatctcaattaaacctgaaggagtccgtgaacctgacaaaccagctcctgtggagggaaaaatcatcaaggaccatttattggaagaatccacatttgctccatacatagatgatctctctgaagaacagcgcagggctcctcagatcaccacccctgtcaaaatcacactgacggaaatagaaccttctgttgaaaccactacccaagagaagacccctgagaagcaagatatatgtctaaagccaagtcctgacacagtccccactgtcactgtctcggagcctgaagacgacagcccaggatctatcacccctccatcttctggaacagaaccatctgctgcagaatcccaggggaaaggcagcatctccgaggatgagctgatcaccgccatcaaagaagcaaagggattatcgtatgaaaccgccgagaacccacggccggtgggccagctggccgacaggcccgaggtcaaggccaggtccggaccgccaaccatccccagccccctggaccacgaggccagcagcgcggagtcgggggactcagagatcgagctggtgtccgaggaccccatggccgcggaggacgcgctgccctcaggctatgtgagctttggccacgtgggcggcccgccgccctcgcccgcctcgccatccatccagtacagcatcctgagggaggagcgcgaggccgagctggacagcgagctcatcatcgagtcgtgcgacgcctcctcggcctcggaggagagccccaagcgggagcaggactcacccccgatgaagcccagcgccctggatgccatccgggaggagactggcgtccgggccgaggagcgtgcgccaagccggcggggcctggccgagccgggttccttcctcgactacccctcaactgagccccagcctggccccgagctgccccctggagacggagccctggagcctgagacgcccatgttgccacggaagcctgaagaagactcgagttccaaccaaagtcctgcggccacaaagggccctgggcctctaggtcctggcgccccgcccccactgctgtttctcaataagcaaaaagctattgacctgttgtattggcgggacatcaagcagacgggcatcgtgtttgggagtttcctgctgctgctcttctccctgacccagttcagcgtggtgagcgtcgtggcctacctggccctggccgcactctcagccaccatcagtttccgcatctacaagtctgttttacaagcagtgcagaaaaccgacgaaggccaccctttcaaggcctacttggagcttgagatcaccctttctcaggagcagattcagaagtacacggactgcctgcagttctacgtgaacagcacacttaaggaactgaggaggctcttccttgtccaggacctggtggattccttaaaatttgcagtcctgatgtggctcctgacctacgttggcgctctcttcaatggcctgaccctgctgctcatggctgtggtttcaatgtttactctacctgtagtgtatgttaagcaccaggcacagattgaccaatatctgggacttgtgaggactcacataaatgctgttgtggcaaagattcaggctaaaatcccaggcgctaagaggcacgctgagtaaactgatttcccaccggggactggacacaaacaggaatgtctggagtggtaacagctctcttcttactcattactgcaaattgattgtctttcccccctccctccagtaccataatcttagagacaaaccttaaaacagctgtttttaggctgttccttgtactcttaggatatttgagtcacttgtgtcaaccactaaagtatagagaaaagtgtattagatgtggtttttaattttgtgttgctaaaaaaagtgcatgatggtgagagcccaagttatctttccctcttcggtgttcttcttctcttctctgcaatgcttctgtagcttctaatgttccccgtggctaggcctttcctgccgagtgctctgatgcaatagtggaaatcgcttatatgtccttgggttgctggttggattaatctttaataacaatatatagaattgtagactgatgttttagcatttttccaacacacacaacgtaaaaataaaagcagtcgaccgcacttatggtaatcagttttgtataacttaaaataattaaataaatgaataaatccaaaacaaacatgcagtacttttgttgtatgggattggtgggctgatttacatgtatggttactaaaaagtaccagcatgttaactttattacaatttgtattactttctctgtagttcctaatggattcaattacggactctggatatttgcacttatgtacttgatactgaatgcataaataaatgttactaaatgtagaatgttaaaaaaaaaaaaaaaaaa

SEQ ID NO: 522 - protein, 776 aa, Homo Sapiens
MAAPGDPQDELLPLAGPGSQWLRHRGEGENEAVTPKGATPAPQAGEPSPGLGARAREAASREAGSGPARQSPVAMETASTGVAGVSSAMDHTFSTTSKDGEGSCYTSLISDICYPPQEDSTYFTGILQKENGHVTISESPEELGTPGPSLPDVPGIESRGLFSSDSGIEMTPAESTEVNKILADPLDQMKAEAYKYIDITRPEEVKHQEQHHPELEDKDLDFKNKDTDISIKPEGVREPDKPAPVEGKIIKDHLLEESTFAPYIDDLSEEQRRAPQITTPVKITLTEIEPSVETTTQEKTPEKQDICLKPSPDTVPTVTVSEPEDDSPGSITPPSSGTEPSAAESQGKGSISEDELITAIKEAKGLSYETAENPRPVGQLADRPEVKARSGPPTIPSPLDHEASSAESGDSEIELVSEDPMAAEDALPSGYVSFGHVGGPPPSPASPSIQYSILREEREAELDSELIIESCDASSASEESPKREQDSPPMKPSALDAIREETGVRAEERAPSRRGLAEPGSFLDYPSTEPQPGPELPPGDGALEPETPMLPRKPEEDSSSNQSPAATKGPGPLGPGAPPPLLFLNKQKAIDLLYWRDIKQTGIVFGSFLLLLFSLTQFSVVSVVAYLALAALSATISFRIYKSVLQAVQKTDEGHPFKAYLELEITLSQEQIQKYTDCLQFYVNSTLKELRRLFLVQDLVDSLKFAVLMWLLTYVGALFNGLTLLLMAVVSMFTLPVVYVKHQAQIDQYLGLVRTHINAVVAKIQAKIPGAKRHAE

SEQ ID NO: 523 - DNA, 3241 bp, Homo Sapiens
gtgcagggcggggctggcctgcggaagggggcgggttcggaggagtgaactgtgcggttagtgcgcctttcagcctcacctgcagctgcgcctccttgcacctgcgcctgtgctttttctcccagcactgcggacgcgactcgagggtgacgctcgctccgctcgtcccgctcgtcatggcctacccgggatacggaggagggtttggaaattttagcattcaggtgccaggaatgcagatgggacagccagtgccagaaacaggcccagctatactcctcgatggatactctgggccagcatattcagacacttattcctcagctggtgactccgtgtatacttacttcagtgctgttgctggacaggatggtgaagtggatgctgaagaacttcagagatgtttgacacagtctggaattaatggaacttactctcccttcagtttggaaacctgcagaattatgattgccatgttggatagagatcacacaggaaaaatgggatttaatgcattcaaagagctatgggcagctcttaatgcctggaaggaaaacttcatgactgttgatcaagatggaagtggcacagtagaacatcatgagttgcgtcaagccattggtcttatgggttataggttgagtcctcaaacattaactactattgttaaacgttatagcaagaatggcagaattttctttgatgattatgttgcttgctgtgtgaagcttcgagcattgacagatttctttaggaaaagagaccacttgcaacaagggtctgcgaatttcatatatgacgattttttgcagggcactatggcaatttgaatgcttagaattttaaacctgaagagacactgtgaattcttttgtttggaagaagtgaactggactactttaaaacttttaagggttttctatgttcttcctacctgttaaacctcttccctttctgtgtgtttttattttagcagatagttcaaagcaataaaagatttcttttttaatttgaggtattactgcttttggaaaagttattttataaatatgtgcatattgtcataaaatattgtatgattaattgatttaaataatgcttagccttaattttagataatgtaaatttagaggaatgtactttacaagatagattgtataagaagccaaataatgaaagcctagaaaaaactaatttatacttatctgaaggttacaaattagacttttaaattttctttgtagttggtggtgtttgagggttggctagaaatgaaagcctggattttgtgccatgtttgtaatatagtttgttccttgatcaaataatcagagaaaagaaacttaaagatctttgtctgtgaagaagaaaattatctccctagttcaatctgtagtgaaataagactacagaaggcattgttttttccttttttattttttgtattatatatttttcttaaatatgttttattgtcttctctaagcaaaaagttcttaataaacatagtatttctctctgcgtcctatttcattagtgaagacatagttcacctaaaatggcatcctgctctgaatctagactttttagaaatggcatatgtttttgatgatatgtcaacattcaaaattgtcctaattaaattgttgtttaaatgtaatgtcaactctttataaacttaaaaataaacaagtaattaaccactctaattgttcagaaattttacatttgacttatttgacaacattaacattagtggtggctttgccattaaaaacccagtaagtattttgagtgcatctatgtgatgtggtgttttgagcatagtaggcaccacagcaacttttctgcgtggtactaaaactgccgaaaatgcgacgtagaatcaccagatctttagtgtttaatatccctggtataagatgttataattaatgtaatttctttcttggcaaacacctcatgtctgtcttagtgaagatttaataaaccacttatttttcttatgctttaaatgtgtattttctaacctaacagtgagtgacataattttatgactgctgaccaaattaatttatagattttataaaatcccatgtttcttaatggatggaggatagatggcaatatcttgaacaaaatcttttataaacttacagaattttaaatcagccttcacttaaaaaaatcctggaaaggaagtaacgcatagtcacttgacactgataattttatataatttgctgtcaaattcacttggtcagttttataaaaatgtgtgaataggtaatacacataattttgttctctggcttttttatgaacatatatttgataatgtgagaggacattaactgagctgggaaattaaagaaacagaattctaattagaagtgttgtaggaaaaagcaaatgtgaaaacactaagtgtcgttcacatcgaatggtgataatgtcgctcagcaacctgtaatcttaacatccaggttatacagatggtcgttactgaactattctgcggtcgattatgattatctctcttacttggaggctcacagttgaggtaaaacttttaaaatgacaaatggtattattcatgtaagcttctgccaggtgacactctatattagaactctttaacacaattttcatttaaaaatgttcttatgacttttggtcatagaaggtctatgaaggagcttccatggccaaacatatttagaaactctcactttctaaagcttgacaaggtatattagcatctgaaaccccaaggttaataaaatcagtcatgtttaattttatttgacccagttttttccaaactttttgaccacagaacccctttctctagcaaaacctaacattctatgccgatccaacttaattgccaggcaactcttctgcactttacattaaacagacaaacttatgttaacaaaaacattaggcctagagaatattttaccagaatttttatactgaaatacagttcactttttcgatgctttaaaaataactgatatttttatgatgaacatgactgtaatatgaatatagtatagtagtttgcactggttaacttacaccccagttcttttacgatgatgtaaattattgaataatgtacactcttaatgtataagtgcttttatttatacagtaaacatgtttccatgtcattttgagaatttttttaataaacattcaaatagcttgctgtaaaaaaaaaaaaaaaaaa

SEQ ID NO: 524 - protein, 217 aa, Homo Sapiens
MAYPGYGGGFGNFSIQVPGMQMGQPVPETGPAILLDGYSGPAYSDTYSSAGDSVYTYFSAVAGQDGEVDAEELQRCLTQSGINGTYSPFSLETCRIMIAMLDRDHTGKMGFNAFKELWAALNAWKENFMTVDQDGSGTVEHHELRQAIGLMGYRLSPQTLTTIVKRYSKNGRIFFDDYVACCVKLRALTDFFRKRDHLQQGSANFIYDDFLQGTMAI

SEQ ID NO: 525 - DNA, 4284 bp, Homo Sapiens
cggggccgtggccgaggcctgcgcgccgcccggccgcctgcactgcgcgcgcgcccaccccgcgtgggaggcagcgggaggggcccggagaggtgtggagcggcgcggcgggaggctccgtgggcggccacgggagacagcgccggcgggagcgcgcctctcggcctttcctccgcgcccccgcgtccccagccggccgctccgagaggacccggaggaggcaggtggctttctagaagatgaccatagaggaccttccagattttccattagaaggaaatcctttgtttggaagatacccatttatattttctgcttctgataccccagttatcttttccatttctgcagcaccaatgccttcagactgtgaattttctttctttgatcctaatgatgcatcatgccaggaaattctttttgatcccaaaacttcagtttcagaattatttgccattttgagacagtgggttcctcaggtccaacaaaacattgacattattggaaatgagattcttaagagaggttgcaatgtgaatgatagagatggattgacagatatgactcttttacattatacctgcaaatctggagctcatggtattggtgatgtggaaacagctgtaaaatttgcaactcagcttattgacctgggagcagacattagtttgcggagtcgctggacaaacatgaatgctttgcattatgctgcttattttgatgtccctgaacttataagagtgattttgaaaacatcgaaaccaaaagatgtggatgccacttgcagtgattttaattttggaacagctttgcatattgcagcatacaacttgtgtgcaggtgctgtgaagtgcctcttggagcagggagcaaatcctgcatttaggaatgacaaaggacagatccctgctgatgttgttccagacccagtagatatgccgttagagatggctgacgccgcagccactgctaaggaaatcaagcagatgcttctagatgcggtgcctctgtcatgtaacatctcaaaggccatgctcccaaattatgatcatgtcactggcaaggcaatgcttacgtcacttggcctgaagttgggggatcgtgttgttattgcaggacagaaggttggtacattaagattttgtggaacaactgaatttgcaagtgggcagtgggctggcattgaactggatgaaccagaaggaaaaaataatggaagtgttggaaaagtccagtactttaaatgtgcccccaagtatggtatttttgcacctctttcaaagataagtaaagcaaaaggtcgaaggaagaatataacacacactccttctacaaaagctgctgtacctctcatcaggtcccagaaaattgacgtagctcatgtgacgtcaaaagtaaatactggattaatgacatcaaaaaaagatagtgcttctgagtcaacactttcattgcctcctggtgaagaacttaaaactgtgacagagaaagatgttgccctgcttggatctgtcagcagctgctcctctacatcttctttggaacacagacagagctaccccaagaaacagaatgcaatcagcagtaacaagaagacaatgagcaaaagcccttccctttcatccagagccagtgctggtttgaattcctcagcaacatctacagcaaataatagccgttgcgagggggaactccgcctcggagagagagtgttagtggtaggacagagactgggcaccattaggttctttgggacaacaaacttcgctccaggatattggtatggtatagagcttgaaaaaccccatggcaagaatgatggttcagttggaggtgtgcagtattttagctgttctccaagatatggaatatttgctcccccatccagggtgcaaagagtaacagattccctggataccctttcagaaatttcttcaaataaacagaaccattcttatcctggttttaggagaagttttagcacaacttctgcttcttcccaaaaggagattaacagaagaaatgctttttccaaatcgaaagctgctttgcgtcgcagttggagcagcacccccaccgcaggtggcattgaagggagcgtgaagctgcacgaggggtctcaggtcctgctcacgagctccaatgagatgggtactgttaggtatgtgggccccactgactttgcttcaggtatctggcttggacttgagctccgaagcgccaagggaaaaaatgatgggtcagtgggtgacaagcgctatttcacctgtaagccgaaccatggagtcttagttcgaccgagcagagtgacctatcggggaattaatgggtcaaaacttgtggatgagaattgttaagcttctaaaatattaaataagctcaaatatatatatttggtgtaaataaagagtccatggtaaatggtttactttatttagccatattaaaattttgaaaatatagttatcttcttaaaaaccattataacaattcagagagagttctttacaaagccatgaatatgaactatggggaatcatggttcttttaaagcaattttcaaaataagtaccaattaaagctttaggttccaagaagattctgggactcaggaagaaaaagtgccatcaggtgaccagctgttgcatttcttgcttattctgttttgtttttgcacatcataatggatttttcttagtgccctaattgtgaagggtttctctagctttggttatgtgtaatgttcacgtgacctttttttgtcaatcatttttggaatttttctttctttctgtgctttattactaataagtccaatgagtgagtagtagctagatgactagtatgtagttttatattttggtaaaattatttgccctttcagaaatgcctcatctaaagatacatgataattttggagttggaaggggccttagaggctctccagctctgcttcttgcccattgccaaatactgaaatggaagcccgtcttacctggggtcactaactggttggttaactgagctaagaatagactgtgggtctcctcacttgtggcccagtgctctttctgctatacaaaatgtctaatctcagatttttcttctgctgcttgactgcttcatctggatgaactacaaaaaacccatgattaaggtttatgaattcaagtaataattagattttttttgcacagacttacttaacttccttattggatatgtttgtaacacataaacacaaagcacttttcaaacatgatgcacttttatctttgtgaataatttactgtcctttcctcctgggatatgagaaacattttaaaaaacgtatttaacagaagagagcaaataaagatatatcaggaaggatgtattagttatttacttaaatgtttataatatctggattttttttgttttgttactcatagaactggtgttgtttgctgtttttatttctctaattgttgcagagttctgcctgttacaaagctacagaactgtattgtttttattttccttcttgagcacatgttaacaaactaagcttcacattagagtgatgtcataatgtaaaatgtttgcattgtggttaggtattgaagtttatgtcctgtctgtgtaaagattcatcttttattgtaaatatttagactttaccacagaaatattggaacagtttgctttataagattaaaaagcatccttcagaatggagcttgccttgtgcttagaaataatatgttgaactattttgcaatatactattttaaatctaaattctgtcacttcgctgcctttttaaaatagtgtggtatttcaaatattgctagagctattttcctgaaatacatttgcaaaataaggctgctttgtaatcaaggaatatttttattgattgaaggaaatgactgtactgcgattcaaaagtaaacttattttattatacagattatttcttaaaaactctatttataccttaacatgaaatccatgaccacaccaaacttggttattcataatttttcctgttaaatataaaacactgtaagttaaaaacagtaatgccaacattgaatttatttttgaggtcaaagaaccagttgttctctttatatttagatgaggatgattgagtccatatactatgtatgtttacatatactatacatgcacattaggtgttttcatttgtgttttgcttatgaaatgtcatttaaagttcacttcttgagcatcaataaaaagggaagctgtgtggttttggaatggtaaaaaaaa

SEQ ID NO: 526 - protein, 705 aa, Homo Sapiens
MTIEDLPDFPLEGNPLFGRYPFIFSASDTPVIFSISAAPMPSDCEFSFFDPNDASCQEILFDPKTSVSELFAILRQWVPQVQQNIDIIGNEILKRGCNVNDRDGLTDMTLLHYTCKSGAHGIGDVETAVKFATQLIDLGADISLRSRWTNMNALHYAAYFDVPELIRVILKTSKPKDVDATCSDFNFGTALHIAAYNLCAGAVKCLLEQGANPAFRNDKGQIPADVVPDPVDMPLEMADAAATAKEIKQMLLDAVPLSCNISKAMLPNYDHVTGKAMLTSLGLKLGDRVVIAGQKVGTLRFCGTTEFASGQWAGIELDEPEGKNNGSVGKVQYFKCAPKYGIFAPLSKISKAKGRRKNITHTPSTKAAVPLIRSQKIDVAHVTSKVNTGLMTSKKDSASESTLSLPPGEELKTVTEKDVALLGSVSSCSSTSSLEHRQSYPKKQNAISSNKKTMSKSPSLSSRASAGLNSSATSTANNSRCEGELRLGERVLVVGQRLGTIRFFGTTNFAPGYWYGIELEKPHGKNDGSVGGVQYFSCSPRYGIFAPPSRVQRVTDSLDTLSEISSNKQNHSYPGFRRSFSTTSASSQKEINRRNAFSKSKAALRRSWSSTPTAGGIEGSVKLHEGSQVLLTSSNEMGTVRYVGPTDFASGIWLGLELRSAKGKNDGSVGDKRYFTCKPNHGVLVRPSRVTYRGINGSKLVDENC

SEQ ID NO: 527 - DNA, 3767 bp, Homo Sapiens
agcggactgggcatgctcggcagcccgggaggctcgcggtggcaagtcgaaagcgttcgcaccagcggggcagcggctgcgggcggcaggcggcgggcaggtcgggagtgagaaggaccggcctgggctgactgctctcccctcgcgcctagggagccggtcggagagcgcgattggggtgcggagccccgacgctgccctgccccggatttcattccgcggcgggggctccgcgagcggaattccggcggctgccgtgactccagtgcaacgtgacgacagcatgtacgatccctgaatgggcccgtgggcatatttagtcattcatttttgatcaggagaaagaagacagccatcatttgaaaggtaaagcttcagcgactgaaggagtgtggactttttgaatttcaagaacagtaaagttggaacacagcagagggtgtgtaataaaatacagattggaaagaagactgatgaagaaaaataacagcatgattcaggcacaccattgagttctttgggatgcccgaaagtgtctggttgggaaacatgaaatagaagacgagaacctgcctcagcaagcgtacctgagaatacttttaaaggaacctgttgataaatgcaaaacagtggctgttgcaggtgatggaactgtactggaacaatgggagaagctggtagcttataggaagccaagatgaccagaatgtttttaaataatccaaggaagaatcctgctcaaaaatgaggtgaattaatacttgggcgctcaggaaccctggacagctacatgaggtgtttaaaaactgccctgaccatcttgccaaacaagtctctgctcatgaggccccacaggatgaacgagccgaggcaggacagtgtcctgccctgtcggaacagtgactgctgacctgccaagagagagctggggactgcctgctgtctgccagtacaatgaaggaagtggtttattggtcacccaagaaggtggcagactggctgctggagaatgctatgccagaatactgtgagcctctggagcatttcacaggccaggacttgatcaacctaacccaagaggatttcaaaaaaccccccttgtgccgagtctcctctgacaatgggcagcggctcctggacatgatagaaaccctgaaaatggagcaccatttggaagcacacaagaacggccatgccaatgggcacctcaacattggcgtagacatccccacccccgacggcagcttcagcatcaagattaaacccaacgggatgccaaatgggtataggaaagagatgataaagatccccatgccagaactggagcgctctcagtaccccatggagtggggcaagacttttctggcctttctttatgcactttcctgtttcgttctcaccacagtgatgatctcggtcgtccacgaacgagtacctcctaaggaggtgcagcctccactaccggacacattttttgaccattttaaccgggtgcagtgggccttttctatttgtgaaattaatggcatgatccttgtaggactctggttaattcagtggctgctcttaaaatacaagtctattattagcagaagatttttctgcatagttggcacgctgtacctgtatcggtgtattacaatgtatgtaactacactcccagtacctggtatgcatttcaactgttctccgaagcttttcggagactgggaagcccaactgcgaagaataatgaagctcattgctggaggtggcttgtctatcactggctctcacaacatgtgtggggactatctgtacagcggccacacggtcatgctaacacttacctacttatttatcaaagagtattcccctcggcgactctggtggtatcactggatttgctggcttctcagcgtagttggaatcttctgtattctcttagcgcatgaccactacactgtggacgtggtggtggcatattacatcaccacgagactcttctggtggtatcacactatggccaatcagcaagtgctaaaggaagcttcccagatgaacctcctggccagggtgtggtggtacaggccatttcagtactttgaaaagaatgtccaaggaattgtacctcgatcttaccattggcctttcccctggccagtagtccacctcagtaggcaagttaaatacagccggctggtgaatgacacataacagctgtacaaagtggggaaaagacaaattgtccgaagtgctaagaactccatgagagaagatgccataaaataaacacctccctaatcctattatctttcaatggttaccttgacttaacctattgagttacctggtcagcactgtgatctttttttctctccaaaggacctgcgttggacaacaataaagaaaaatttaacctatcatgcactgtacacatttcctgttcataagtttgggatttacataacccgcaaccaccatgttcctttgtatatgatgcagcagcataaatgtaagcttttatatcataagttctggtctttccagtcacatctggaaataaagcgtattattttcttgggaaaacatacttttcatatctcttgccccaaagattgggctgtaagccattttctagcaaatgtctctatgaaggtttctaagtacctgaatggggtttgattctgaaatctttctacctgttgcaccgatattcaaataaaaatgatagacacagaaaggtttggtaactttgggttttgtaaaatcagcaaaggcagtgtttcaaaaagtgcaaaaaaaaagattctgttataaagtgattttctaagtatttcctaactttatttttcaaaatgatgttatgaacaccaaatttaaagatttttaacatgtcagagagaagagagttaaaatttaaaaatgcatcttgggagagaaatttgtctatgtttctagtgcctttcttgtcttgattgtatggtcagtaggcaatcttaaatgtttttatttaaaataaagtattccttgaaaatataaatatatgtatacactactaaattttgcatttatagctaaattgaatcagaagactgcttatggttttaaaattgcaatgacttaaataatgaggttgttaattagagtcagagcctgttcacatattgtgatcaggtagcaatgacatgtaccacttaaattattttatcgtcgatttggtagttcaattttaactactcaatgaaaacagccatgaatatcttttcttaaagagagttttgaaaatgatcacttacctaaaacttgaaagctatgaattagttatccatactctcatgacaattttgttggtgaacaacaaaaaagagatctatttctttaaaagatatttgtgcagaaactgcatgtaactctaagttttactcctaacatacatatgtttggggaagtattctattctatacttgccaatgtggagaacaaaatagttttttaagaatgaagaagtatatatatccattctgtattttacgtgcagcagaattatcttccgtaggatttttttgtgtattcacaaggtgatatttgtattgtaaaacaataatggtgaaggaaataaaaaggcttttaaaattttgtttgttttaaatctttgtaaagttattattccagagagtatactggtatcttacagcttacctagatcataaattaatcaaaatgcactttttaataaaaactgatacttaaaataaatggctgttatttctaaaaaaaaaaaaaaa

SEQ ID NO: 528 - protein, 413 aa, Homo Sapiens
MKEVVYWSPKKVADWLLENAMPEYCEPLEHFTGQDLINLTQEDFKKPPLCRVSSDNGQRLLDMIETLKMEHHLEAHKNGHANGHLNIGVDIPTPDGSFSIKIKPNGMPNGYRKEMIKIPMPELERSQYPMEWGKTFLAFLYALSCFVLTTVMISVVHERVPPKEVQPPLPDTFFDHFNRVQWAFSICEINGMILVGLWLIQWLLLKYKSIISRRFFCIVGTLYLYRCITMYVTTLPVPGMHFNCSPKLFGDWEAQLRRIMKLIAGGGLSITGSHNMCGDYLYSGHTVMLTLTYLFIKEYSPRRLWWYHWICWLLSVVGIFCILLAHDHYTVDVVVAYYITTRLFWWYHTMANQQVLKEASQMNLLARVWWYRPFQYFEKNVQGIVPRSYHWPFPWPVVHLSRQVKYSRLVNDT

SEQ ID NO: 529 - DNA, 8815 bp, Homo Sapiens
gcccgcgccggctgtgctgcacagggggaggagagggaaccccaggcgcgagcgggaagaggggacctgcagccacaacttctctggtcctctgcatcccttctgtccctccacccgtccccttccccaccctctggcccccaccttcttggaggcgacaacccccgggaggcattagaagggatttttcccgcaggttgcgaagggaagcaaacttggtggcaacttgcctcccggtgcgggcgtctctcccccaccgtctcaacatgcttaggggtccggggcccgggctgctgctgctggccgtccagtgcctggggacagcggtgccctccacgggagcctcgaagagcaagaggcaggctcagcaaatggttcagccccagtccccggtggctgtcagtcaaagcaagcccggttgttatgacaatggaaaacactatcagataaatcaacagtgggagcggacctacctaggcaatgcgttggtttgtacttgttatggaggaagccgaggttttaactgcgagagtaaacctgaagctgaagagacttgctttgacaagtacactgggaacacttaccgagtgggtgacacttatgagcgtcctaaagactccatgatctgggactgtacctgcatcggggctgggcgagggagaataagctgtaccatcgcaaaccgctgccatgaagggggtcagtcctacaagattggtgacacctggaggagaccacatgagactggtggttacatgttagagtgtgtgtgtcttggtaatggaaaaggagaatggacctgcaagcccatagctgagaagtgttttgatcatgctgctgggacttcctatgtggtcggagaaacgtgggagaagccctaccaaggctggatgatggtagattgtacttgcctgggagaaggcagcggacgcatcacttgcacttctagaaatagatgcaacgatcaggacacaaggacatcctatagaattggagacacctggagcaagaaggataatcgaggaaacctgctccagtgcatctgcacaggcaacggccgaggagagtggaagtgtgagaggcacacctctgtgcagaccacatcgagcggatctggccccttcaccgatgttcgtgcagctgtttaccaaccgcagcctcacccccagcctcctccctatggccactgtgtcacagacagtggtgtggtctactctgtggggatgcagtggctgaagacacaaggaaataagcaaatgctttgcacgtgcctgggcaacggagtcagctgccaagagacagctgtaacccagacttacggtggcaactcaaatggagagccatgtgtcttaccattcacctacaatggcaggacgttctactcctgcaccacagaagggcgacaggacggacatctttggtgcagcacaacttcgaattatgagcaggaccagaaatactctttctgcacagaccacactgttttggttcagactcgaggaggaaattccaatggtgccttgtgccacttccccttcctatacaacaaccacaattacactgattgcacttctgagggcagaagagacaacatgaagtggtgtgggaccacacagaactatgatgccgaccagaagtttgggttctgccccatggctgcccacgaggaaatctgcacaaccaatgaaggggtcatgtaccgcattggagatcagtgggataagcagcatgacatgggtcacatgatgaggtgcacgtgtgttgggaatggtcgtggggaatggacatgcattgcctactcgcagcttcgagatcagtgcattgttgatgacatcacttacaatgtgaacgacacattccacaagcgtcatgaagaggggcacatgctgaactgtacatgcttcggtcagggtcggggcaggtggaagtgtgatcccgtcgaccaatgccaggattcagagactgggacgttttatcaaattggagattcatgggagaagtatgtgcatggtgtcagataccagtgctactgctatggccgtggcattggggagtggcattgccaacctttacagacctatccaagctcaagtggtcctgtcgaagtatttatcactgagactccgagtcagcccaactcccaccccatccagtggaatgcaccacagccatctcacatttccaagtacattctcaggtggagacctaaaaattctgtaggccgttggaaggaagctaccataccaggccacttaaactcctacaccatcaaaggcctgaagcctggtgtggtatacgagggccagctcatcagcatccagcagtacggccaccaagaagtgactcgctttgacttcaccaccaccagcaccagcacacctgtgaccagcaacaccgtgacaggagagacgactcccttttctcctcttgtggccacttctgaatctgtgaccgaaatcacagccagtagctttgtggtctcctgggtctcagcttccgacaccgtgtcgggattccgggtggaatatgagctgagtgaggagggagatgagccacagtacctggatcttccaagcacagccacttctgtgaacatccctgacctgcttcctggccgaaaatacattgtaaatgtctatcagatatctgaggatggggagcagagtttgatcctgtctacttcacaaacaacagcgcctgatgcccctcctgacccgactgtggaccaagttgatgacacctcaattgttgttcgctggagcagaccccaggctcccatcacagggtacagaatagtctattcgccatcagtagaaggtagcagcacagaactcaaccttcctgaaactgcaaactccgtcaccctcagtgacttgcaacctggtgttcagtataacatcactatctatgctgtggaagaaaatcaagaaagtacacctgttgtcattcaacaagaaaccactggcaccccacgctcagatacagtgccctctcccagggacctgcagtttgtggaagtgacagacgtgaaggtcaccatcatgtggacaccgcctgagagtgcagtgaccggctaccgtgtggatgtgatccccgtcaacctgcctggcgagcacgggcagaggctgcccatcagcaggaacacctttgcagaagtcaccgggctgtcccctggggtcacctattacttcaaagtctttgcagtgagccatgggagggagagcaagcctctgactgctcaacagacaaccaaactggatgctcccactaacctccagtttgtcaatgaaactgattctactgtcctggtgagatggactccacctcgggcccagataacaggataccgactgaccgtgggccttacccgaagaggacagcccaggcagtacaatgtgggtccctctgtctccaagtacccactgaggaatctgcagcctgcatctgagtacaccgtatccctcgtggccataaagggcaaccaagagagccccaaagccactggagtctttaccacactgcagcctgggagctctattccaccttacaacaccgaggtgactgagaccaccattgtgatcacatggacgcctgctccaagaattggttttaagctgggtgtacgaccaagccagggaggagaggcaccacgagaagtgacttcagactcaggaagcatcgttgtgtccggcttgactccaggagtagaatacgtctacaccatccaagtcctgagagatggacaggaaagagatgcgccaattgtaaacaaagtggtgacaccattgtctccaccaacaaacttgcatctggaggcaaaccctgacactggagtgctcacagtctcctgggagaggagcaccaccccagacattactggttatagaattaccacaacccctacaaacggccagcagggaaattctttggaagaagtggtccatgctgatcagagctcctgcacttttgataacctgagtcccggcctggagtacaatgtcagtgtttacactgtcaaggatgacaaggaaagtgtccctatctctgataccatcatcccagaggtgccccaactcactgacctaagctttgttgatataaccgattcaagcatcggcctgaggtggaccccgctaaactcttccaccattattgggtaccgcatcacagtagttgcggcaggagaaggtatccctatttttgaagattttgtggactcctcagtaggatactacacagtcacagggctggagccgggcattgactatgatatcagcgttatcactctcattaatggcggcgagagtgcccctactacactgacacaacaaacggctgttcctcctcccactgacctgcgattcaccaacattggtccagacaccatgcgtgtcacctgggctccacccccatccattgatttaaccaacttcctggtgcgttactcacctgtgaaaaatgaggaagatgttgcagagttgtcaatttctccttcagacaatgcagtggtcttaacaaatctcctgcctggtacagaatatgtagtgagtgtctccagtgtctacgaacaacatgagagcacacctcttagaggaagacagaaaacaggtcttgattccccaactggcattgacttttctgatattactgccaactcttttactgtgcactggattgctcctcgagccaccatcactggctacaggatccgccatcatcccgagcacttcagtgggagacctcgagaagatcgggtgccccactctcggaattccatcaccctcaccaacctcactccaggcacagagtatgtggtcagcatcgttgctcttaatggcagagaggaaagtcccttattgattggccaacaatcaacagtttctgatgttccgagggacctggaagttgttgctgcgacccccaccagcctactgatcagctgggatgctcctgctgtcacagtgagatattacaggatcacttacggagagacaggaggaaatagccctgtccaggagttcactgtgcctgggagcaagtctacagctaccatcagcggccttaaacctggagttgattataccatcactgtgtatgctgtcactggccgtggagacagccccgcaagcagcaagccaatttccattaattaccgaacagaaattgacaaaccatcccagatgcaagtgaccgatgttcaggacaacagcattagtgtcaagtggctgccttcaagttcccctgttactggttacagagtaaccaccactcccaaaaatggaccaggaccaacaaaaactaaaactgcaggtccagatcaaacagaaatgactattgaaggcttgcagcccacagtggagtatgtggttagtgtctatgctcagaatccaagcggagagagtcagcctctggttcagactgcagtaaccaacattgatcgccctaaaggactggcattcactgatgtggatgtcgattccatcaaaattgcttgggaaagcccacaggggcaagtttccaggtacagggtgacctactcgagccctgaggatggaatccatgagctattccctgcacctgatggtgaagaagacactgcagagctgcaaggcctcagaccgggttctgagtacacagtcagtgtggttgccttgcacgatgatatggagagccagcccctgattggaacccagtccacagctattcctgcaccaactgacctgaagttcactcaggtcacacccacaagcctgagcgcccagtggacaccacccaatgttcagctcactggatatcgagtgcgggtgacccccaaggagaagaccggaccaatgaaagaaatcaaccttgctcctgacagctcatccgtggttgtatcaggacttatggtggccaccaaatatgaagtgagtgtctatgctcttaaggacactttgacaagcagaccagctcagggagttgtcaccactctggagaatgtcagcccaccaagaagggctcgtgtgacagatgctactgagaccaccatcaccattagctggagaaccaagactgagacgatcactggcttccaagttgatgccgttccagccaatggccagactccaatccagagaaccatcaagccagatgtcagaagctacaccatcacaggtttacaaccaggcactgactacaagatctacctgtacaccttgaatgacaatgctcggagctcccctgtggtcatcgacgcctccactgccattgatgcaccatccaacctgcgtttcctggccaccacacccaattccttgctggtatcatggcagccgccacgtgccaggattaccggctacatcatcaagtatgagaagcctgggtctcctcccagagaagtggtccctcggccccgccctggtgtcacagaggctactattactggcctggaaccgggaaccgaatatacaatttatgtcattgccctgaagaataatcagaagagcgagcccctgattggaaggaaaaagacagacgagcttccccaactggtaacccttccacaccccaatcttcatggaccagagatcttggatgttccttccacagttcaaaagacccctttcgtcacccaccctgggtatgacactggaaatggtattcagcttcctggcacttctggtcagcaacccagtgttgggcaacaaatgatctttgaggaacatggttttaggcggaccacaccgcccacaacggccacccccataaggcataggccaagaccatacccgccgaatgtaggtgaggaaatccaaattggtcacatccccagggaagatgtagactatcacctgtacccacacggtccgggactcaatccaaatgcctctacaggacaagaagctctctctcagacaaccatctcatgggccccattccaggacacttctgagtacatcatttcatgtcatcctgttggcactgatgaagaacccttacagttcagggttcctggaacttctaccagtgccactctgacaggcctcaccagaggtgccacctacaacatcatagtggaggcactgaaagaccagcagaggcataaggttcgggaagaggttgttaccgtgggcaactctgtcaacgaaggcttgaaccaacctacggatgactcgtgctttgacccctacacagtttcccattatgccgttggagatgagtgggaacgaatgtctgaatcaggctttaaactgttgtgccagtgcttaggctttggaagtggtcatttcagatgtgattcatctagatggtgccatgacaatggtgtgaactacaagattggagagaagtgggaccgtcagggagaaaatggccagatgatgagctgcacatgtcttgggaacggaaaaggagaattcaagtgtgaccctcatgaggcaacgtgttatgatgatgggaagacataccacgtaggagaacagtggcagaaggaatatctcggtgccatttgctcctgcacatgctttggaggccagcggggctggcgctgtgacaactgccgcagacctgggggtgaacccagtcccgaaggcactactggccagtcctacaaccagtattctcagagataccatcagagaacaaacactaatgttaattgcccaattgagtgcttcatgcctttagatgtacaggctgacagagaagattcccgagagtaaatcatctttccaatccagaggaacaagcatgtctctctgccaagatccatctaaactggagtgatgttagcagacccagcttagagttcttctttctttcttaagccctttgctctggaggaagttctccagcttcagctcaactcacagcttctccaagcatcaccctgggagtttcctgagggttttctcataaatgagggctgcacattgcctgttctgcttcgaagtattcaataccgctcagtattttaaatgaagtgattctaagatttggtttgggatcaataggaaagcatatgcagccaaccaagatgcaaatgttttgaaatgatatgaccaaaattttaagtaggaaagtcacccaaacacttctgctttcacttaagtgtctggcccgcaatactgtaggaacaagcatgatcttgttactgtgatattttaaatatccacagtactcactttttccaaatgatcctagtaattgcctagaaatatctttctcttacctgttatttatcaatttttcccagtatttttatacggaaaaaattgtattgaaaacacttagtatgcagttgataagaggaatttggtataattatggtgggtgattattttttatactgtatgtgccaaagctttactactgtggaaagacaactgttttaataaaagatttacattccacaacttgaagttcatctatttgatataagacaccttcgggggaaataattcctgtgaatattctttttcaattcagcaaacatttgaaaatctatgatgtgcaagtctaattgttgatttcagtacaagattttctaaatcagttgctacaaaaactgattggtttttgtcacttcatctcttcactaatggagatagctttacactttctgctttaatagatttaagtggaccccaatatttattaaaattgctagtttaccgttcagaagtataatagaaataatctttagttgctcttttctaaccattgtaattcttcccttcttccctccacctttccttcattgaataaacctctgttcaaagagattgcctgcaagggaaataaaaatgactaagatattaaaaaaaaaaaaaaaaaa

SEQ ID NO: 530 - protein, 2477 aa, Homo Sapiens
MLRGPGPGLLLLAVQCLGTAVPSTGASKSKRQAQQMVQPQSPVAVSQSKPGCYDNGKHYQINQQWERTYLGNALVCTCYGGSRGFNCESKPEAEETCFDKYTGNTYRVGDTYERPKDSMIWDCTCIGAGRGRISCTIANRCHEGGQSYKIGDTWRRPHETGGYMLECVCLGNGKGEWTCKPIAEKCFDHAAGTSYVVGETWEKPYQGWMMVDCTCLGEGSGRITCTSRNRCNDQDTRTSYRIGDTWSKKDNRGNLLQCICTGNGRGEWKCERHTSVQTTSSGSGPFTDVRAAVYQPQPHPQPPPYGHCVTDSGVVYSVGMQWLKTQGNKQMLCTCLGNGVSCQETAVTQTYGGNSNGEPCVLPFTYNGRTFYSCTTEGRQDGHLWCSTTSNYEQDQKYSFCTDHTVLVQTRGGNSNGALCHFPFLYNNHNYTDCTSEGRRDNMKWCGTTQNYDADQKFGFCPMAAHEEICTTNEGVMYRIGDQWDKQHDMGHMMRCTCVGNGRGEWTCIAYSQLRDQCIVDDITYNVNDTFHKRHEEGHMLNCTCFGQGRGRWKCDPVDQCQDSETGTFYQIGDSWEKYVHGVRYQCYCYGRGIGEWHCQPLQTYPSSSGPVEVFITETPSQPNSHPIQWNAPQPSHISKYILRWRPKNSVGRWKEATIPGHLNSYTIKGLKPGVVYEGQLISIQQYGHQEVTRFDFTTTSTSTPVTSNTVTGETTPFSPLVATSESVTEITASSFVVSWVSASDTVSGFRVEYELSEEGDEPQYLDLPSTATSVNIPDLLPGRKYIVNVYQISEDGEQSLILSTSQTTAPDAPPDPTVDQVDDTSIVVRWSRPQAPITGYRIVYSPSVEGSSTELNLPETANSVTLSDLQPGVQYNITIYAVEENQESTPVVIQQETTGTPRSDTVPSPRDLQFVEVTDVKVTIMWTPPESAVTGYRVDVIPVNLPGEHGQRLPISRNTFAEVTGLSPGVTYYFKVFAVSHGRESKPLTAQQTTKLDAPTNLQFVNETDSTVLVRWTPPRAQITGYRLTVGLTRRGQPRQYNVGPSVSKYPLRNLQPASEYTVSLVAIKGNQESPKATGVFTTLQPGSSIPPYNTEVTETTIVITWTPAPRIGFKLGVRPSQGGEAPREVTSDSGSIVVSGLTPGVEYVYTIQVLRDGQERDAPIVNKVVTPLSPPTNLHLEANPDTGVLTVSWERSTTPDITGYRITTTPTNGQQGNSLEEVVHADQSSCTFDNLSPGLEYNVSVYTVKDDKESVPISDTIIPEVPQLTDLSFVDITDSSIGLRWTPLNSSTIIGYRITVVAAGEGIPIFEDFVDSSVGYYTVTGLEPGIDYDISVITLINGGESAPTTLTQQTAVPPPTDLRFTNIGPDTMRVTWAPPPSIDLTNFLVRYSPVKNEEDVAELSISPSDNAVVLTNLLPGTEYVVSVSSVYEQHESTPLRGRQKTGLDSPTGIDFSDITANSFTVHWIAPRATITGYRIRHHPEHFSGRPREDRVPHSRNSITLTNLTPGTEYVVSIVALNGREESPLLIGQQSTVSDVPRDLEVVAATPTSLLISWDAPAVTVRYYRITYGETGGNSPVQEFTVPGSKSTATISGLKPGVDYTITVYAVTGRGDSPASSKPISINYRTEIDKPSQMQVTDVQDNSISVKWLPSSSPVTGYRVTTTPKNGPGPTKTKTAGPDQTEMTIEGLQPTVEYVVSVYAQNPSGESQPLVQTAVTNIDRPKGLAFTDVDVDSIKIAWESPQGQVSRYRVTYSSPEDGIHELFPAPDGEEDTAELQGLRPGSEYTVSVVALHDDMESQPLIGTQSTAIPAPTDLKFTQVTPTSLSAQWTPPNVQLTGYRVRVTPKEKTGPMKEINLAPDSSSVVVSGLMVATKYEVSVYALKDTLTSRPAQGVVTTLENVSPPRRARVTDATETTITISWRTKTETITGFQVDAVPANGQTPIQRTIKPDVRSYTITGLQPGTDYKIYLYTLNDNARSSPVVIDASTAIDAPSNLRFLATTPNSLLVSWQPPRARITGYIIKYEKPGSPPREVVPRPRPGVTEATITGLEPGTEYTIYVIALKNNQKSEPLIGRKKTDELPQLVTLPHPNLHGPEILDVPSTVQKTPFVTHPGYDTGNGIQLPGTSGQQPSVGQQMIFEEHGFRRTTPPTTATPIRHRPRPYPPNVGEEIQIGHIPREDVDYHLYPHGPGLNPNASTGQEALSQTTISWAPFQDTSEYIISCHPVGTDEEPLQFRVPGTSTSATLTGLTRGATYNIIVEALKDQQRHKVREEVVTVGNSVNEGLNQPTDDSCFDPYTVSHYAVGDEWERMSESGFKLLCQCLGFGSGHFRCDSSRWCHDNGVNYKIGEKWDRQGENGQMMSCTCLGNGKGEFKCDPHEATCYDDGKTYHVGEQWQKEYLGAICSCTCFGGQRGWRCDNCRRPGGEPSPEGTTGQSYNQYSQRYHQRTNTNVNCPIECFMPLDVQADREDSRE

SEQ ID NO: 531 - DNA, 1255 bp, Homo Sapiens
gggacagaggcctcagagagccacccaatgagtccacagcagccatggacagtccgtgagggggagggtgtgcctgcagggggcgtggccccatgccgcccgccacctgcatgcgcactgggccgaccaatcagcgaggagcgcgggcagccggggcggctgctgctctcgtgagaacagaggacccaggccctcggaggagcttcgcggtgccagcctctgcaggtcctctgagggagcaacatcagggctccctcaggttcagaggtcgcctctagcttcccaggccagtcagccacggagcccgtgggcaggaagggcagcaggatggctgccaaggaccagttggaggttcaagttatggccgcccaggaaatggagcttgcaggaaaggatccagtaagtcatgagcatgaggaaagaaaacctgttacagagacaaaggagggagatgtaactgatgagcatggggaaagaggatcttttgctgaaacagatgaacacacgggggttgataccaaggagctagaagatattgcagctgacattaaagagcatcttgctgcaaagagaaaaaggattgaaaagattgcaaaagcttgcagcgaaataaagaacagaattaaaaatgttttgagaacaacacaactaaaaaggcagaaacgtgattatagaatttctctgaagttgccgaatgtccttgaagagttcatcacagatgagcagaaagatgaggaaggagatggagaaaaggaagaacaaattaaaatatttcaagagcaacaaaagaggtggcaacaagatgggaaaggaactgaaagagattgagccaccacacgagcaattcacaaagctgcagcaagagttggcacttattcagatgtatcttcaacctctgttattctggtgactgacaaaagaacttgaacctatgttatatgatacatgcataacttgagctacactaaaccacatgacagtgtttagttaattcttgtataaattagtatatctcttctattattagtctgtttgttaaatgccagaccacgtttctatgatctgttgaatgaaccctagacagttctgtgagaaagcagcaattgcacagttacatacacagtcaattaaattttaacattaaagataatttagttttaggtttggcctctgtggatctgtatcagttccaaaatgtggaaagcacgggcatggaaaagtacatttttctctaataaaagaagacaaaccctta

SEQ ID NO: 532 - protein, 166 aa, Homo Sapiens
MAAKDQLEVQVMAAQEMELAGKDPVSHEHEERKPVTETKEGDVTDEHGERGSFAETDEHTGVDTKELEDIAADIKEHLAAKRKRIEKIAKACSEIKNRIKNVLRTTQLKRQKRDYRISLKLPNVLEEFITDEQKDEEGDGEKEEQIKIFQEQQKRWQQDGKGTERD

SEQ ID NO: 533 - DNA, 6051 bp, Homo Sapiens
tggtgaggttgcctgtaactgacttcaaaaggccattccaccattccgtcaagccagctgctttagaacggttgggaacaccgtgagaccagtgaattccacgagcacgaacccactgctgcgcttcatttgctgtgaagtgagtcccttgatcagagcaatgctgtgtggaccatcgtgaaggtggacaaggcattttaaaggggatgtttgggctgaaggtgaagaagaagagaaataaggcagagaaggggttaatcctagccaacaaggctgcgaaagatagtcaaggtgacactgaagcactgcaggaggagccttctcaccaggaaggaccgagaggagatttggtccatgatgatgcttctatctttcctgtcccctcagcttctccaaagagaagatcaaaactgttgactaagatccatgatggggaggtcagatcccaaaattatcaaattgccataaccatcaccgaggctcgccagctggtgggtgagaacattgacccagttgtgaccattgagattggggatgagaagaagcaaagcacagtgaaggaaggaaccaacagcccattttataatgaatactttgtcttcgacttcattgggccccaagtgcatctttttgacaagatcatcaaaatctccgtctttcaccacaagctgataggaagtgtactgattggctctttcaaagtagacctggggaccgtgtacaaccaacctggtcatcagttctgcaacaagtgggccctgctcacagaccctggtgacatcaggactggcaccaaggggtacctgaaatgtgacatcagtgtcatgggaaaaggtgatgtcttgaagaccagccctaaaacttctgacaccgaggagccaatagaaaagaaccttttgatccccaatgggtttccactggagagaccgtgggccagattctatgtgagactctacaaagcagaagggttgcccaaaatgaattcaagcatcatggcgaacgtcaccaaggcatttgtgggtgacagtaaggacctggtggatccctttgtggaggtctcctttgctgggcagatggggcgaaccacagtgcagaagaactgtgctgatcctgtgtggcatgaacaggtgatcttcaaggaaatgttccctcccttgtgtcggagggtgaaaatccaggtgtgggatgaaggcagcatgaatgacgtagccctggcaacccatttcattgacctgaagaaaatctccaacgaacaggatggagacaaaggctttctgcccacctttgggcctgcctggattaacctgtatggctcgcccaggaaccacagtctgatggatgactaccaggaaatgaacgaaggctttggggaaggtgtgtcattcaggggcagaatcttggtagaaattgctgtggaaatcctctcaggacgggcacaggaatctaaattttccaaggccctgaaggagctcaagttgccttccaaggacaaagactccaaatcttccaaaggtaaagacaaggctgacaaaactgaagatggaaaatcccaacaggcttcaaacaaaactaactcaaccgaggtggaggtggaatcgttcgatgtccccccggagattgtaccagaaaaaaatgaggaatttttactctttggagcattttttgaagctaccatgattgaccggaagattggagataaacccatcagctttgaagtttctattggtaattttggaaacctgattgatggaggatcccatcatgggagtaagaagtcagctgaatcagctgaagaagacctccttccactgcttcacgaagggcaaggggatgtggcccatgatgttcccattcctatggcctccaccactcacccggagaagccactggtgacagaagggaacaggaattacaactatttgccatttgaggctaagaagccctgtgtctatttcatcagctcttggggagaccagaccttcaggctgcactggtccaacatgctggagaaaatggcagacttcctggaagaaagtatagaagaagtgagagaattgatcaagatttcacaggaggcacctgaagagaaaatgaaaacagtgctcagtgacttcatcagtcggagcagtgcctttatctctgaagcagaaaaaaagcccaagatgttgaaccaaaccactttagataagaagcgacttacgctctgctggcaggagctggaagcaatgtgcaaggaggccaaggggatcattcagcagcagaagaaaaagttatctgttgatgaaatgattcacgaagcccaaaactttgtggaaaaaatccgctttcttgttgatgagccccagcacactatccctgacgttttcatctggatgctcagcaacaacaggagagtggcctatgcccgcatcgcctccaaagacctcctctattcccctgtcgcggggcagatgggcaaacactgcggcaagatcaaaactcacttcctcaaacctcctgggaaacgaccggctggttggtctgtgcaagcaaaagtcgacgtgtacctgtggctgggctccatcaagcatgccagtgccattttggacaacttgccagtaggctatgaagcagaaatgtcctccaaaggggctggcaccaatcaccccccatctaacctgctctaccaagaacagcatgtttttcagctgagggctcacatgtaccaagcccggggcctcatcgcagctgacagcaatggactttcagacccttttgccaaagtcacgttcctttctcactgccagacaacaaagataatctcccagaccctctctccgacctggaaccagatgctgctgttcaatgatttggtgctgcatggagatgtgaaggagctggcagagtccccgcccttagtggtggtggagctgtatgacagcgacgctgtggggaagccagaatatttgggtgccacagtggctgctcctgttgtgaagctggctgaccaggactatgagccccccaggttatgctatcaccccatcttttgtgggaatctctctggaggggatctccttgctgtatttgaactgctgcaggttcctccttctgggctgcaaggcctcccacccgttgagccaccagacatcacccagatctacccggttcctgccaacattcggccggtgctgagcaaataccgagtggaggttctcttctggggagttcgggaaatgaagaaggtgcagctcctctctgtggatcggcctcaggctctcattgagtgcggaggacaaggtgtgaagtcctgcgtgatccagagctacaagaacaacccgaacttcagcatccaggcagacgctttcgaagtggaactgcctgagaacgagcttctgcacccgccactgagcatctgcgtggtggactggagagcttttgggaggagtacccttgtgggcacctacaccatcaactacttgaagcagtttttgtgtaaactcagagagccccttgcccccatcacacaggtggatggaacccagcctgggcacgatatttcagattcgctaacagccactgagtcctctggagcccacagctcctcccaggatcccccagcagatcacatttatgtggatgttgagccacctcccacagtggtgcccgactctgcccaggcccagccggccatcctggttgacgtccctgactcatccccgatgctggagcctgaacacacacctgtagcccaggagccaccaaaagatggaaaacctaaggatcccaggaagccttcccggaggtccactaagaggagaaagaggaccatagcagatgaatctgctgaaaacgtgattgactggtggtctaagtattatgcctccctgaagaaagcccagaaggcaaaggagagaaatcccaagggaaaaaaaggcaatacagaggcaaagccagatgaggtagtggtagatatagaagatgggccaaagaagaagaaagacaaaatgctcaagaagaaacccaaagatgatggaatccccaacctggccatcttgcagatatatgacggtgatctcgagagtgaattcaacaattttgaagactgggtgaaaacttttgagctcttcagaggcaagtctacggaagatgaccatggtcttgatggagaccgagtcataggaaaatttaagggctccttctgcatctacaaaagcccccaggattctagctctgaggacagcgggcagctgagaatccagcaagggattccgcccaatcaccctgtcacagtgctgatcagagtatacattgtcgcggcatttaatcttagtccagctgatccagatggcaaatcagatccctacattgtgatcaagcttggcaagacagaaatcaaagaccgggataaatacatccctaaacaactgaacccagtatttggaaggtcatttgagatccaagccacattcccaaaagagtccctgctctccatcctgatctatgaccatgacatgattggcacagatgaccttattggtgagaccaagatcgacctggagaaccgcttctacagcaaacaccgagccatctgtggcttgcagagccagtatgagatagaaggatacaatgcctggagagacacgtccaaacccaccgaaatcctcactaagctctgcaaagacaacaagctggatggaccctactttcaccctgggaaaatacagataggaaaccaagtcttttctggaaaaactatcttcactgaagaggacactgatgagacagtggagtcttatgaacacctggccctcaaggttttacactcttgggaggatatcccggaagtcgggtgtaggctggttcctgaacacatagaaactcggccactgtaccacaaggataagccaggaatggagcagggccgcctgcagatgtgggtggacatgtttcccaaggatatgcctcaacctggacctcctgttgacatctctccaaggcgacccaaaggatacgaattgagagtgaccatctggaacactgaagatgtcattttagaggatgagaatatcttcacaggccaaaaatcaagtgatatttatgtgaaagggtggttaaagggcttggaggatgacaagcaggagacagatgtgcattacaactccctgactggagagggcaacttcaactggcgcttcctgtttccctttcagtatctcccagctgagaagcaaatggtcattaccaagagggagaacatcttctctttagagaagatggagtgtaagactcctgctgtgttggtgctgcaggtttgggattttgaaaggctgtcctcagatgacttcctgggcaccctggaaatgaacctcaacagtttccctcgagcagctaagtctgccaaagcctgtgatcttgccaagtttgaaaatgcaagtgaggagaccaagatctctatattccagcaaaaacgtgtgcgtggctggtggcctttttctaaaagcaaagaactcacaggcaaggttgaagctgagttccacctagttacagcagaagaagctgagaaaaatcctgttggaaaagcccgaaaggagccagagcccctggccaagcccaaccgcccagacacctccttttcgtggttcatgagcccctttaagtgcctgtactacctcatctggaagaattacaaaaagtacatcatcattgctttcattctcatcatcctcatcatcttcctcgtccttttcatctacaccttgccaggagccatcagccgaaggatcgttgtgggctcatagaggatcatggaggacccagatcctcgccatatactaatcctctcttccttatctgggagcatctaagaacatgtcccatgcatggcactgtgctgagtgctaaggggacagatcaacccttcttggaagagatggaaaagaaacatttcctccctgctccaacccctgcctccaagtttcaaacttgtaaggcatgttttatcccttgggcagcatgaaataaggcactttcacctcatggtaatcaacaatgacctcaaattgacttaga

SEQ ID NO: 534 - protein, 1857 aa, Homo Sapiens
MFGLKVKKKRNKAEKGLILANKAAKDSQGDTEALQEEPSHQEGPRGDLVHDDASIFPVPSASPKRRSKLLTKIHDGEVRSQNYQIAITITEARQLVGENIDPVVTIEIGDEKKQSTVKEGTNSPFYNEYFVFDFIGPQVHLFDKIIKISVFHHKLIGSVLIGSFKVDLGTVYNQPGHQFCNKWALLTDPGDIRTGTKGYLKCDISVMGKGDVLKTSPKTSDTEEPIEKNLLIPNGFPLERPWARFYVRLYKAEGLPKMNSSIMANVTKAFVGDSKDLVDPFVEVSFAGQMGRTTVQKNCADPVWHEQVIFKEMFPPLCRRVKIQVWDEGSMNDVALATHFIDLKKISNEQDGDKGFLPTFGPAWINLYGSPRNHSLMDDYQEMNEGFGEGVSFRGRILVEIAVEILSGRAQESKFSKALKELKLPSKDKDSKSSKGKDKADKTEDGKSQQASNKTNSTEVEVESFDVPPEIVPEKNEEFLLFGAFFEATMIDRKIGDKPISFEVSIGNFGNLIDGGSHHGSKKSAESAEEDLLPLLHEGQGDVAHDVPIPMASTTHPEKPLVTEGNRNYNYLPFEAKKPCVYFISSWGDQTFRLHWSNMLEKMADFLEESIEEVRELIKISQEAPEEKMKTVLSDFISRSSAFISEAEKKPKMLNQTTLDKKRLTLCWQELEAMCKEAKGIIQQQKKKLSVDEMIHEAQNFVEKIRFLVDEPQHTIPDVFIWMLSNNRRVAYARIASKDLLYSPVAGQMGKHCGKIKTHFLKPPGKRPAGWSVQAKVDVYLWLGSIKHASAILDNLPVGYEAEMSSKGAGTNHPPSNLLYQEQHVFQLRAHMYQARGLIAADSNGLSDPFAKVTFLSHCQTTKIISQTLSPTWNQMLLFNDLVLHGDVKELAESPPLVVVELYDSDAVGKPEYLGATVAAPVVKLADQDYEPPRLCYHPIFCGNLSGGDLLAVFELLQVPPSGLQGLPPVEPPDITQIYPVPANIRPVLSKYRVEVLFWGVREMKKVQLLSVDRPQALIECGGQGVKSCVIQSYKNNPNFSIQADAFEVELPENELLHPPLSICVVDWRAFGRSTLVGTYTINYLKQFLCKLREPLAPITQVDGTQPGHDISDSLTATESSGAHSSSQDPPADHIYVDVEPPPTVVPDSAQAQPAILVDVPDSSPMLEPEHTPVAQEPPKDGKPKDPRKPSRRSTKRRKRTIADESAENVIDWWSKYYASLKKAQKAKERNPKGKKGNTEAKPDEVVVDIEDGPKKKKDKMLKKKPKDDGIPNLAILQIYDGDLESEFNNFEDWVKTFELFRGKSTEDDHGLDGDRVIGKFKGSFCIYKSPQDSSSEDSGQLRIQQGIPPNHPVTVLIRVYIVAAFNLSPADPDGKSDPYIVIKLGKTEIKDRDKYIPKQLNPVFGRSFEIQATFPKESLLSILIYDHDMIGTDDLIGETKIDLENRFYSKHRAICGLQSQYEIEGYNAWRDTSKPTEILTKLCKDNKLDGPYFHPGKIQIGNQVFSGKTIFTEEDTDETVESYEHLALKVLHSWEDIPEVGCRLVPEHIETRPLYHKDKPGMEQGRLQMWVDMFPKDMPQPGPPVDISPRRPKGYELRVTIWNTEDVILEDENIFTGQKSSDIYVKGWLKGLEDDKQETDVHYNSLTGEGNFNWRFLFPFQYLPAEKQMVITKRENIFSLEKMECKTPAVLVLQVWDFERLSSDDFLGTLEMNLNSFPRAAKSAKACDLAKFENASEETKISIFQQKRVRGWWPFSKSKELTGKVEAEFHLVTAEEAEKNPVGKARKEPEPLAKPNRPDTSFSWFMSPFKCLYYLIWKNYKKYIIIAFILIILIIFLVLFIYTLPGAISRRIVVGS

SEQ ID NO: 535 - RNA, 1502 nt, Homo Sapiens
ggaggggcgggcggccccaggcgggcgggcgcagggcgcagggcgccgaccgcggagagggggccccgggcgcgaggcggagcccggcgcgcagccaggcgggggggcccccggcaggcgcagacccccggcccgggagccgcagcaggaccggccaggaggcgccaagaggggagccccacccgggcgacaggcccaccgcgcccacgaggaccagcggccgccggcggcgggggcgcggcgacccaccggccccgagggccagcgcaacaccgcccaacaccagagcggcgcgccacgaccgcgcgaccgcagggcgcaccagggggggcagcgacggcaggacagcaggacggccacgagacggggcagaggccgcggccaacgggaggagacgaaggacagaaggcacgcaacaccgcggcccgcaacaggaagacaaggcagcggggaacacaacagccagccacgcccggaggaccagggggagagggaggaagaaggccaaggaggccgcacccgaggccagacaaaacaccaaacagcaaaacgagaggaaagcaagccgacccaaacgaccaccgacaggaagacaagaagaccagagaacaaacaaaccacagagggagaagggacccagggaacacaacccccagaccacgaccagccacaagaggcgacgggcccagccaacgaagacgcggagcaagcaggagaggaaccaggagaaaagcgggagagcgggggccccagccaacgcaaaaacggccccggaagacggagggcagcacccgacccaaaccgacaagcaagacccggaagcaagaaaggaggagaaaggaggagcgcagagcgaggggaccgaagaccaggccaaaaggccggagccccgaccccggccacagcgccaaccccgcaccaaccacagagggggccgcggggggaggagagccaaccagcaggcccggacagagagacacgggaacacggagcaaagaaaaaaacccgacaaaagaagaaaagaagggcaaagacccaacccggaaaaaaaacagccgagggccaacaagaaaccgaaacggaaagaagaaaaggaacacacagaggaggcgagaagccaaggccaggggcaaacagccagagaagacgcgaagcccccagcccaaagcacccgccagcgccggcgggagcagcgcgcccggaggaggagaggcgccgaagagccagcgcgccccacgggacacggcgagagggagagacagggggggggggagcccggagcccaacagacaggaccccagcgaggcgggagacccgcagggagggcagggcaccgcggaggggcccccagagaaaacaaaagagaaggcaaaggagcgaggagcgaaaaccaaggccgagaacacaggaagaagcagaagcccaggagccgagcgacaacggaagaaagggacagcaaggcagagaaagaagaaagaagcgagaaggaaagagagaaaaaa

SEQ ID NO: 536 - DNA, 2723 bp, Homo Sapiens
gggcggggcgcaggagccccggggcggaggagccggggaggcgggaggcgggaggcgggaggtgttggggccgttgaagcggcctccctcccgcccccagccgcccggtctggccccagccctgtcccgacccccggcctggcccactccgaccctacccggccgaagggttccgctggacacgcaggcggcctccggagcagcccaagcccatgagggccgcgcgcccggccgccggtgctgacgagacggagctcctggcccccgaggaggagcagaggatcaatgcggttcaagaatcgattccagcggttcatgaaccatcgagctccagccaatggccgctacaagccaacttgctatgaacatgctgctaactgttacacacacgcattcctcattgttccggccatcgtgggcagtgccctcctccatcggctgtctgatgactgctgggaaaagataacagcatggatttatggaatgggactctgtgccctcttcatcgtttctacagtatttcacattgtatcatggaaaaagagccacttaaggacagtggagcattgttttcacatgtgtgatagaatggttatctatttcttcattgctgcttcttatgctccatggttaaatcttcgtgaacttggacccctggcatctcatatgcgttggtttatctggctcatggcagctggaggaaccatttatgtatttctctaccatgaaaaatataaggtggttgaactctttttctatctcacaatgggattctctccagccttggtggtgacatcaatgaacaacaccgatggacttcaggaacttgcctgtgggggcttaatttattgcttgggagttgtgttcttcaagagtgatggcatcattccatttgcccacgccatctggcacctgtttgtggccacggcagctgcagtgcattactacgccatttggaaatacctttaccgaagtcctacggactttatgcggcatttatgaccaatctgtactaattctccaaaccagtattatttcaattatggcacttgggagtggggtgagagctaaacattgcacagggaaagaaaaaaaataactgcactgactttatatcttttgaatataattactgtgaaagtataaaggctgtgttctggaattttctgcctcacagcaaataaataaggtagtgaattaattattcattccattccactatcatgaaggactctgaatagacttggccaactgatgtttacaaaccagacttttatattttaattttacagattttactacatgatttttctaaattactatgtcaggttgtaaaagtcagtgcaataacaaaccttcctttttaagaagaaaattgtttctattactttcccattcactaggtaaagaatcatggacagaacttacactactttttaccatgtttcatcttggcataacatggttcttttttaaatagaaactttagttttttgtaaatttttaaaaaaatatttcattgatatgcatctctgcaggtcctcattcatgttgtaaatttttgcagcaagcagtcaacattccacaaacgaacaaacattatacctcttctgatagttttattaagcatggagaaattgccaatttttaaaaactgcagttttccaaacttttctgccaacctcttactctgaattcagtgctgctttgggacatatacttgacctagcttggtttaccagtgatggaaaagtattttgatatcattaactttttcaaaagatccaactttttctctatgcctttgccacattctcttcagggtctctttccacagtggataaatgttttttctgtattatgacagtattgttgtgatggccatctgctggaaactcctgaagagcattatgtattacagtgagcagttgtattgcctgtttggtgcccaatggttaagtcattgtcacttagctttatattgtcagtttgatatttattttaaattgtggaactagatgcataaattcacatttctgcctttcctttgcatcttctcatatattgtgtttttttttttttttcctagaaaaaatatttaaagcattgtttgacaggtagaaactcatgtatctgtagtccatgagttatatcctggctcagtggagtgatatttatgtattatttttacttttctctcagtgtcttatattaagattaacatgttgttaatagttgctttgttgattaatctctcttgttggtgttttaataaatgaaataggcttgcctttagatcgggtgctgatattgcctgtttcctagtaatgggctgatcaaatgatcagtggaattcttggtttgatgataaccttattaattgaaattttttactgatgtggctttaaaagaggtttattttgtatatgtttagaactctctgattttgatgaattatatgggaatgagaaacagaagaagtggtatttgctggcgagttaaataggcaaggtacccagtgataacaccaaccaaaccactcctatctgcatgattctgaacatctggatgcctgttgttttactgtgtatattttatttttaatatattaactttgtggattcatttaaggtctactcaaaagtaacactgtcaaaaccactaatatgtatgtaaaaattgtgctgtatactacaataaagttgttacttggatttgttcca

SEQ ID NO: 537 - protein, 238 aa, Homo Sapiens
MRFKNRFQRFMNHRAPANGRYKPTCYEHAANCYTHAFLIVPAIVGSALLHRLSDDCWEKITAWIYGMGLCALFIVSTVFHIVSWKKSHLRTVEHCFHMCDRMVIYFFIAASYAPWLNLRELGPLASHMRWFIWLMAAGGTIYVFLYHEKYKVVELFFYLTMGFSPALVVTSMNNTDGLQELACGGLIYCLGVVFFKSDGIIPFAHAIWHLFVATAAAVHYYAIWKYLYRSPTDFMRHL

SEQ ID NO: 538 - DNA, 6276 bp, Homo Sapiens
attaaattaacaccatttgaaagagaacattgttttcatcatgaatgctaataaagatgaaagacttaaagccagaagccaagattttcacctttttcctgctttgatgatgctaagcatgaccatgttgtttcttccagtcactggcactttgaagcaaaatattccaagactcaagctaacctacaaagacttgctgctttcaaatagctgtattccctttttgggttcatcagaaggactggattttcaaactcttctcttagatgaggaaagaggcaggctgctcttgggagccaaagaccacatctttctactcagtctggttgacttaaacaaaaattttaagaagatttattggcctgctgcaaaggaacgggtggaattatgtaaattagctgggaaagatgccaatacagaatgtgcaaatttcatcagagtacttcagccctataacaaaactcacatatatgtgtgtggaactggagcatttcatccaatatgtgggtatattgatcttggagtctacaaggaggatattatattcaaactagacacacataatttggagtctggcagactgaaatgtcctttcgatcctcagcagccttttgcttcagtaatgacagatgagtacctctactctggaacagcttctgatttccttggcaaagatactgcattcactcgatcccttgggcctactcatgaccaccactacatcagaactgacatttcagagcactactggctcaatggagcaaaatttattggaactttcttcataccagacacctacaatccagatgatgataaaatatatttcttctttcgtgaatcatctcaagaaggcagtacctccgataaaaccatcctttctcgagttggaagagtttgtaagaatgatgtaggaggacaacgcagcctgataaacaagtggacgacttttcttaaggccagactgatttgctcaattcctggaagtgatggggcagatacttactttgatgagcttcaagatatttatttactccccacaagagatgaaagaaatcctgtagtatatggagtctttactacaaccagctccatcttcaaaggctctgctgtttgtgtgtatagcatggctgacatcagagcagtttttaatggtccatatgctcataaggaaagtgcagaccatcgttgggtgcagtatgatgggagaattccttatccacggcctggtacatgtccaagcaaaacctatgacccactgattaagtccacccgagattttccagatgatgtcatcagtttcataaagcggcactctgtgatgtataagtccgtatacccagttgcaggaggaccaacgttcaagagaatcaatgtggattacagactgacacagatagtggtggatcatgtcattgcagaagatggccagtacgatgtaatgtttcttggaacagacattggaactgtcctcaaagttgtcagcatttcaaaggaaaagtggaatatggaagaggtagtgctggaggagttgcagatattcaagcactcatcaatcatcttgaacatggaattgtctctgaagcagcaacaattgtacattggttcccgagatggattggttcagctctccttgcacagatgcgacacttatgggaaagcttgcgcagactgttgtcttgccagagacccctactgtgcctgggatggaaatgcatgctctcgatatgctcctacttctaaaaggagagctagacgccaagatgtaaaatatggcgacccaatcacccagtgctgggacatcgaagacagcattagtcatgaaactgctgatgaaaaggtgatttttggcattgaatttaactcaacctttctggaatgtatacctaaatcccaacaagcaactattaaatggtatatccagaggtcaggggatgagcatcgagaggagttgaagcccgatgaaagaatcatcaaaacggaatatgggctactgattcgaagtttgcagaagaaggattctgggatgtattactgcaaagcccaggagcacactttcatccacaccatagtgaagctgactttgaatgtcattgagaatgaacagatggaaaatacccagagggcagagcatgaggaggggaaggtcaaggatctattggctgagtcacggttgagatacaaagactacatccaaatccttagcagcccaaacttcagcctcgaccagtactgcgaacagatgtggcacagggagaagcggagacagagaaacaaggggggcccaaagtggaagcacatgcaggaaatgaagaagaaacgaaatcgaagacatcacagagacctggatgagctccctagagctgtagccacgtagttttctacttaatttaaagaaaagaattccttacctataaaaacattgccttctgttttgtatatcccttatagtaattcataaatgcttcccatggagttttgctaaggcacaagacaataatctgaataagacaatatgtgatgaatataagaaagggcaaaaaattcatttgaaccagttttccaagaacaaatcttgcacaagcaaagtataagaattatcctaaaaatagggggtttacagttgtaaatgttttatgttttgagttttggaatttattgtcatgtaaatagttgagctaagcaagccccgaatttgatagtgtataaggtgctttattccctcgaatgtccattaagcatggaatttaccatgcagttgtgctatgttcttatgaacagatatatcattcctattgagaaccagctaccttgtggtagggaataagaggtcagacacaaattaagacaactcccattatcaacaggaactttctcagtgagccattcactcctggagaatggtataggaatttggagaggtgcattatttctttctggccactggggttaaatttagtgtactacaacattgatttactgaagggcactaatgtttcccccaggatttctattgactagtcaggagtaacaggttcacagagagaagttggtgcttagttatgtgttttttagagtatatactaagctctacagggacagaatgcttaataaatactttaataagatatgggaaaatattttaataaaacaaggaaaacataatgatgtataatgcatcctgatgggaaggcatgcagatgggatttgttagaagacagaaggaaagacagccataaattctggctttggggaaaactcatatccccatgaaaaggaagaacaatcacaaataaagtgagagtaatgtaatggagctcttttcactagggtataagtagctgccaatttgtaattcatctgttaaaaaaaatctagattataacaaactgctagcaaaatctgaggaaacataaattcttctgaagaatcataggaagagtagacattttatttataaccaatgatatttcagtatatattttctctcttttaaaaaatatttatcatactctgtatattatttctttttactgcctttattctctcctgtatattggattttgtgattatatttgagtgaataggagaaaacaatatataacacacagagaattaagaaaatgacatttctggggagtggggatatatatttgttgaataacagaacgagtgtaaaattttaacaacggaaagggttaaattaactctttgacatcttcactcaaccttttctcattgctgagttaatctgttgtaattgtagtattgtttttgtaatttaacaataaataagcctgctacatgtaaaaagaaccaaactcacaatattaacataaacatctttcatattttgttagtactttcaaatgttttcaatttgactttccctctgaatatgcatggtgtgtttcctgtctgtttaagcagaactcacctttccttcttgtaacacagaacccttagccttcttctgttttgccttttcacgccctttatagtgtgaaatgaaaaattagtcacttcctcacatggaaggcagcttttcagaaaataacagacattgctcgtttctcatgcattctacatatcttgaaagaaaagtctgtgagaaaaccctgtgattagagggcaacttaatgcaagatctgtggctctatgttgagagcattctctctctgttatttttattttatttgcattgcttacctatctcaaagtagtcaaactgatatatgagattgagtactcccttttgatattatactgatgaatatttgtaggtgtttcactataaggaacagctaaggaataattttaataaaagtgaaccagaacaaatcactcatttaaaaagtaattcagaagaacagtgtggcatgatcagacttctaattgaatagcgtaacaacagtgtttgtaattatagatttgcttggacaaaatattccaggaactcatagcgagctcaaagcaattaagtgggaacatttttaatttaaaaaaaatttccaaatatttgtgggtccgacagtaatgatcaaaatatgaatgactttggaaaatttacatgaagctcaagtgttaggattgacttatgaaaataaattttatttctatccaaatttgaatgtccaaaccattttttagttacttctttctaatcctagttattcagacaaaatttggaaacttattttatgaccacatctaatattctggctgctttggatacaatactcttgatttatgataattagttaaaatatattaaaaatattattagtaaaataaaatttcacacaataaaaaacaacatagagtacacatatttatatgtatttttaaagataaagaatatctaaaatgtgtttttttcttagctttttagttgtctagaacatttagagaaagagtatgaatatattaaatccacaaacacactatatacttcctcaccactgactattttatcaaatttgccttaaaataatgaaaaagaaaagtatagttaatggtttcaaatatgctaagaaattgactctgcggaggggatcttaaaatgcctgtttactcatgttttcgtatttttcttgtctctaatacttttgtctttgtctgccttgtgtgttcttttctgaatttcatttcagcaatttatgctgctaaatagaatcccgcatgtctgcattcatttacattcaacttattgtaaattttgagattttatttagaaatgaattgtctaattaatttatgtagagtccttttttccaaagagctcaaaacactacatccacattattgacttttggaaaccaaccaaattacttaagaaatggaaaagtagtcacagagaaatttagtaatttgcaaaagccacaacagtagtggaagaattaaaattcataaagtctcatcattctgttggctaaaataatgctctttacaatatgctggctacaaaatggtcttactcttgaattttgcttttggttcatattttggttcttcatattctagtatgttttgttcctgctgaattttacagactcagctaaacaataagttattagtagtcacttgttttcattatcataattgaatttccaagaacaacttgatatcattcagctgtccaaaaaataataagagcattcattaaatactgattttcttaaacttaaatgttgtatttcatatttatttatataatacaaatggaaatcaaaactgaaatagcctccctttagaatgtcacatttttcttagaaaacattttggaattggttaaccttattgggaatggataatttagaaacaaaccaaaaaaaaaaaaagatatttgaagtgtttttataggagatgtatttttatcatagtaaatgatcacaattttaaataattcatcttacaagtcaggtaaaataaaatcgattcccagattccatacattaggagtgcaaagacaggatcatacacatgacttatacctctcatttaaatattttatagtataaagtatttatggaaagggtttgagatagatgatttttgggaaagggcaaaatgtgtcagatgccctagttaatcatgtaatttaattctggtattgtgagtggttagcaatcaattttgaatttataattctgctattttaaaagaaatgtagtcttgtagtatgaaataattaaaaattgttaaatgtatattttggttgtattataataaaatgcaaacatgactgttctatgattataaaaaaaaaaaaaaaaaaaa

SEQ ID NO: 539 - protein, 777 aa, Homo Sapiens
MNANKDERLKARSQDFHLFPALMMLSMTMLFLPVTGTLKQNIPRLKLTYKDLLLSNSCIPFLGSSEGLDFQTLLLDEERGRLLLGAKDHIFLLSLVDLNKNFKKIYWPAAKERVELCKLAGKDANTECANFIRVLQPYNKTHIYVCGTGAFHPICGYIDLGVYKEDIIFKLDTHNLESGRLKCPFDPQQPFASVMTDEYLYSGTASDFLGKDTAFTRSLGPTHDHHYIRTDISEHYWLNGAKFIGTFFIPDTYNPDDDKIYFFFRESSQEGSTSDKTILSRVGRVCKNDVGGQRSLINKWTTFLKARLICSIPGSDGADTYFDELQDIYLLPTRDERNPVVYGVFTTTSSIFKGSAVCVYSMADIRAVFNGPYAHKESADHRWVQYDGRIPYPRPGTCPSKTYDPLIKSTRDFPDDVISFIKRHSVMYKSVYPVAGGPTFKRINVDYRLTQIVVDHVIAEDGQYDVMFLGTDIGTVLKVVSISKEKWNMEEVVLEELQIFKHSSIILNMELSLKQQQLYIGSRDGLVQLSLHRCDTYGKACADCCLARDPYCAWDGNACSRYAPTSKRRARRQDVKYGDPITQCWDIEDSISHETADEKVIFGIEFNSTFLECIPKSQQATIKWYIQRSGDEHREELKPDERIIKTEYGLLIRSLQKKDSGMYYCKAQEHTFIHTIVKLTLNVIENEQMENTQRAEHEEGKVKDLLAESRLRYKDYIQILSSPNFSLDQYCEQMWHREKRRQRNKGGPKWKHMQEMKKKRNRRHHRDLDELPRAVAT

SEQ ID NO: 540 - DNA, 6226 bp, Homo Sapiens
agcgggtgggggaagctggtaggcacgggcggctccgcagtgaccggactcgggggagcagataatcaccagaatgggagtgaatgacttgtggcaaattttggagcctgttaagcaacacatccccttgcgtaatcttggtgggaaaaccattgcagttgatctgagtctctgggtgtgtgaggcacagacagtcaaaaaaatgatgggcagcgtcatgaagccccacctcaggaacttattttttcgtatctcatatttaacacaaatggatgtaaaactggtatttgttatggaaggggaaccaccaaagctgaaagctgatgtcataagcaagaggaatcagtctcggtatgggtcttctggaaaatcgtggtctcagaaaacagggagatcacattttaaatcagtcttaagagagtgcctccatatgctcgaatgcttaggaatcccctgggttcaggctgctggggaagctgaagccatgtgtgcttatctcaatgctggtggtcatgtcgatggctgcctcaccaatgatggagatactttcctttatggggcccagactgtttacaggaatttcactatgaatacaaaggacccacatgttgactgttacacaatgtcatctatcaagagtaaactaggtttggatagagatgctctggttggattagcaatacttcttggctgtgattatctcccaaagggagtccctggagttggaaaagagcaagcattaaaacttatacagattttgaaagggcaaagtttacttcagaggtttaatcggtggaatgaaacatcttgtaactctagtccacaactgctagtcactaaaaaactggctcattgttccgtatgttcccatccaggttcacctaaggatcatgaacgtaatggatgcagattatgtaaaagtgataaatattgtgagccacatgactatgaatactgctgtccttgtgagtggcaccgtacagaacatgataggcaactcagtgaagtagagaacaatattaagaagaaagcttgctgttgtgagggattcccattccatgaggttattcaagaattccttttaaacaaggataaattggtgaaggttatcaggtaccaaagacctgatttgttattgtttcagagatttactcttgaaaaaatggagtggcccaatcactatgcatgtgagaaattgctggtacttttgacccattatgacatgatagaaagaaagcttggtagcagaaactctaatcaactacagccaattcgaattgttaagactcgaatcagaaatggagttcattgttttgaaatagaatgggaaaagcctgaacattatgctatggaagataaacaacatggagaatttgctttattaacaattgaggaagaatcattgtttgaagcagcatatcctgagatcgttgctgtttaccaaaaacaaaagttagaaattaaagggaagaaacaaaaacgtattaagcctaaagaaaacaatttgccagaaccagatgaagtaatgagctttcagtcacacatgactttaaaacccacatgtgaaatctttcataagcagaattccaagttaaattcggggatttcccctgatcctacattaccacaggaatctatttctgcctcattgaatagcttgcttttacctaaaaatactccatgtttgaatgcacaagaacagttcatgtcttctctaagacctttggctatacagcaaattaaagctgtcagtaagtctctaatttcagaatctagtcaacccaatacctcatctcataatatatccgtgattgctgatctacacttgagcactattgactgggaaggtacttcttttagtaattctccagctattcaaaggaatactttttctcatgatttaaaatcagaagttgaatcagagctatcagccatccctgatggctttgaaaatatcccagaacaactgtcctgtgaatcagaaaggtacactgcaaacataaagaaagtgttggatgaggattctgatgggattagtcctgaagagcatctactttctggcattactgatttatgtcttcaggatttgcctttaaaggaacgaatatttacaaaattatcatatcctcaggataatctacaaccagatgtcaacctgaaaactttgtccatacttagtgtaaaagaatcttgtattgctaacagtggttctgattgtacatcacatctttcaaaggatcttccaggaattcccttgcaaaatgaatccagagactctaaaattctaaaaggagaccagctgcttcaagaagactataaagtcaatacttctgtcccttattctgtcagtaacacagtggtaaagacctgcaatgttagaccaccaaatactgctttagatcatagtagaaaagttgatatgcaaaccactcggaaaattttaatgaagaagagtgtttgccttgacagacattcctctgatgaacaaagtgccccagtgtttgggaaagctaagtacacaactcaaagaatgaagcacagttctcaaaagcataattcatcccatttcaaagaaagtggccataacaagttgagtagccctaagatacatattaaagaaactgaacagtgtgtcagatcttatgaaacagctgaaaatgaagaaagctgtttcccagattcaacaaaaagttctctgagttctctacaatgtcataagaaagaaaacaactctggtacttgtttggatagccctcttcctttacgccagagattaaaactaagattccaaagcacttgaaatttaaaacacttaggtataacttaactattttagtactatcagcaatagcagagacagagggaaggtatctagttcatgtgtggtaaaaattttaatgttctctgtgtcatgaaacacttgccattttaatcaaagttgtaatttttaaaaagtcacctaaaactctggttttaaaagatcctctgtattgaaaacttctgataatgtatgtcattatgtccttactattccttaattgtagttttaaaatattggtatagtacttgacagagtaaatacttcatctgattgttcatttttactttttcttccacaagcctctaaagtatttatattccagcttgttcccaagaggataattctttatacttctcttcattcttttaaggccttgcaaggtcttccgttataactcgctttcctaaaagctattttctccctcagtgtgaagatacctttagtgtgctcttccactttggaaggccatgcaaggtgttccattataactctttttcctaagagttatattctccctcagtttgaagatacctttagtgtgctcttccacttttggtgtcttagtctcttttgaggggcaaaaatagaaaaggagagaagatgtcagtatgtttagtaaaaatcatgctcgtaatggctgaataaactgagcaaagtaactccttatgtatccccagaagttcacaggtatatcgggtggaaaaagatttggaaaatcaaatgtataaccaaaaggattagaaactagcccaggatcacgtagctaactaataatcctgtgggaatcagttttcttgcctgctaatttttttatttttctattttttccttctatagcacttttcccccttttgttttgaatctatgcaatattgactttaataccaccaaatattaagtcatgcattaatttaggtcgcactcaaaaattctagagaggcatccagattgaaaaggaaaatggtgtctgcagatgacaagattgtatgcatcaaaaattctaagaaatccactagaaaactattaaaactgataaagcgagttcatccaggtcgtagaatacaagaccaatgtgcaatgatcattgcattttgtttttgtttgtttgtttttttttgagacagagtctcactcttgtcgagactggggtgtagtggcgccatcttggctcactgcaacctctgcctcccaggttcacgcaattcacatgcctcagccacctgagtagcagggattacaggtgtgtgccaccatgcctggctaatttttagtatttttagtagagatgggattttcccttgttggtcaggctagtcatgaactcctggcctcaagcgatccacccatcttggcctcccagagtgctgggattacaggtgtgaatcaccatactcagcctcaattgtatttctgtacacctctaaataaatggaaatacattccatgttcatgaatcagaagacataagatgaccatactccccaaactgatctacaggttaaatgtaattcccattaattccagctggtttctttgctgattctaaaattcatatggaaatttcaggaacacagaatattaggaagaatcttgaaagagtttgaatgacccacccttcctgattttaagtatacagaactacagtaatgaatgtgttgtactggtataaaggtagacatataggtcaatatagatcaatggcatagaattgagaattcagaaaaaaagccttcacgtttatggtcagttgattttaaaccagagtgccaagacaattcaatgggaaaaggaaacagtctttgaaccaactgtcttctggatctattggatatctatgtaaaaaagagtgacatttgattcctacttcacatgatatttaagaagtaacttaagatggatcaaatacctaaatgtaagctaaagctataaaactcttagaagaaaacatagacgtaaatctttgtgactttggattaggcaaggatttcttaaatatacccaaagcataggcaacaaaagagaatacacaaactggacttcatcaaaactaaaaactgttgtttgaaatgacaccatcaagaaagtgaaaagacagcttacagaatgggagaaaatatttgcaaatcataaatgtgataagggacttgtatcttggtggtatataaagaactcgtaactcaattataaaaagacaactttgaaatgggcaaaatagctcaacaggcttttctgcaaagaagaaatacaaatgaccaagaagcacatttaaaaattttcagtactattactcatcaggaaaatgcaaatcaaaaccacaagacacccaatgtctacaatcaaaaagataataactagtattgatgaggatgtggagaaattgaaattctcataacatgctggtaggaatgtaaaatggggcagccactttggaaaaagtctggtagttcttcaaatggttaaatgtagagttacgatatgatccagcaattcctctcccaggtatatacccaagataaatgaaaacttatatccacataaaaacctgtgcacaaatgtccatagcagcgttattcataatagcctaaaagtggaaacaatcccagttccagaatgaggaaggggagaaactaatgtgtattagctattgtgtgctaagcattcaactagattatttacaaaccttgtatcatctcaactctttaaggactgtattgcaatgttttgaatattcagagagaaaaaagtcgttgctaaaacattttccaaggttctgcttattctgatttgttcagtcgtggctgtgatagttcaggaccatctagaccaggtaaataaaatatctagaggcattcttgagattgtatgagatgaaaataacaaaattagttgggagtggccagtctgagttcattttgctatatagctcaggagtccccaacccctgggctatggacaggtaccagtccatcacctgtcaggaaccggcctgcacagcaggtgttgagcggcatgcaagcgagaattaccgcctgagctctgcctcctgtcagatcagcggtggcattagagtctcataggagcatgaaccctattgtgaactacgcatgcgaggatctagtttgtgcactcctactgagaatctaatgcctgatgatataaggtggaacagcttcatcccacagccatctccccctcatcatccgtggaaaaactgttttccacgaaagtggtcctcggtgccagaaaggttggggactgctgatatacctaatataggcataagtgtaaaattatagttcctcctcctcaaggatttctctgttttcattgtccaggttataccaattctttttaaagcattccatgttcttgttccttgatgtggtcatgttatcacttgtaaat

SEQ ID NO: 541 - protein, 908 aa, Homo Sapiens
MGVNDLWQILEPVKQHIPLRNLGGKTIAVDLSLWVCEAQTVKKMMGSVMKPHLRNLFFRISYLTQMDVKLVFVMEGEPPKLKADVISKRNQSRYGSSGKSWSQKTGRSHFKSVLRECLHMLECLGIPWVQAAGEAEAMCAYLNAGGHVDGCLTNDGDTFLYGAQTVYRNFTMNTKDPHVDCYTMSSIKSKLGLDRDALVGLAILLGCDYLPKGVPGVGKEQALKLIQILKGQSLLQRFNRWNETSCNSSPQLLVTKKLAHCSVCSHPGSPKDHERNGCRLCKSDKYCEPHDYEYCCPCEWHRTEHDRQLSEVENNIKKKACCCEGFPFHEVIQEFLLNKDKLVKVIRYQRPDLLLFQRFTLEKMEWPNHYACEKLLVLLTHYDMIERKLGSRNSNQLQPIRIVKTRIRNGVHCFEIEWEKPEHYAMEDKQHGEFALLTIEEESLFEAAYPEIVAVYQKQKLEIKGKKQKRIKPKENNLPEPDEVMSFQSHMTLKPTCEIFHKQNSKLNSGISPDPTLPQESISASLNSLLLPKNTPCLNAQEQFMSSLRPLAIQQIKAVSKSLISESSQPNTSSHNISVIADLHLSTIDWEGTSFSNSPAIQRNTFSHDLKSEVESELSAIPDGFENIPEQLSCESERYTANIKKVLDEDSDGISPEEHLLSGITDLCLQDLPLKERIFTKLSYPQDNLQPDVNLKTLSILSVKESCIANSGSDCTSHLSKDLPGIPLQNESRDSKILKGDQLLQEDYKVNTSVPYSVSNTVVKTCNVRPPNTALDHSRKVDMQTTRKILMKKSVCLDRHSSDEQSAPVFGKAKYTTQRMKHSSQKHNSSHFKESGHNKLSSPKIHIKETEQCVRSYETAENEESCFPDSTKSSLSSLQCHKKENNSGTCLDSPLPLRQRLKLRFQST

SEQ ID NO: 542 - RNA, 1502 nt, Homo Sapiens; identical to SEQ ID NO: 535

SEQ ID NO: 543 - DNA, 2581 bp, Homo Sapiens
ccggggccagggaccagtggtgggaggaggctgcggcgctagatgcggacacctggaccgccgcgccgaggctcccggcgctcgctgctcccgcggcccgcgccatgccctcctacacggtcaccgtggccactggcagccagtggttcgccggcactgacgactacatctacctcagcctcgtgggctcggcgggctgcagcgagaagcacctgctggacaagcccttctacaacgacttcgagcgtggcgcggtggattcatacgacgtgactgtggacgaggaactgggcgagatccagctggtcagaatcgagaagcgcaagtactggctgaatgacgactggtacctgaagtacatcacgctgaagacgccccacggggactacatcgagttcccctgctaccgctggatcaccggcgatgtcgaggttgtcctgagggatggacgcgcaaagttggcccgagatgaccaaattcacattctcaagcaacaccgacgtaaagaactggaaacacggcaaaaacaatatcgatggatggagtggaaccctggcttccccttgagcatcgatgccaaatgccacaaggatttaccccgtgatatccagtttgatagtgaaaaaggagtggactttgttctgaattactccaaagcgatggagaacctgttcatcaaccgcttcatgcacatgttccagtcttcttggaatgacttcgccgactttgagaaaatctttgtcaagatcagcaacactatttctgagcgggtcatgaatcactggcaggaagacctgatgtttggctaccagttcctgaatggctgcaaccctgtgttgatccggcgctgcacagagctgcccgagaagctcccggtgaccacggagatggtagagtgcagcctggagcggcagctcagcttggagcaggaggtccagcaagggaacattttcatcgtggactttgagctgctggatggcatcgatgccaacaaaacagacccctgcacactccagttcctggccgctcccatctgcttgctgtataagaacctggccaacaagattgtccccattgccatccagctcaaccaaatcccgggagatgagaaccctattttcctcccttcggatgcaaaatacgactggcttttggccaaaatctgggtgcgttccagtgacttccacgtccaccagaccatcacccaccttctgcgaacacatctggtgtctgaggtttttggcattgcaatgtaccgccagctgcctgctgtgcaccccattttcaagctgctggtggcacacgtgagattcaccattgcaatcaacaccaaggcccgtgagcagctcatctgcgagtgtggcctctttgacaaggccaacgccacagggggcggtgggcacgtgcagatggtgcagagggccatgaaggacctgacctatgcctccctgtgctttcccgaggccatcaaggcccggggcatggagagcaaagaagacatcccctactacttctaccgggacgacgggctcctggtgtgggaagccatcaggacgttcacggccgaggtggtagacatctactacgagggcgaccaggtggtggaggaggacccggagctgcaggacttcgtgaacgatgtctacgtgtacggcatgcggggccgcaagtcctcaggcttccccaagtcggtcaagagccgggagcagctgtcggagtacctgaccgtggtgatcttcaccgcctccgcccagcacgccgcggtcaacttcggccagtacgactggtgctcctggatccccaatgcgcccccaaccatgcgagccccgccaccgactgccaagggcgtggtgaccattgagcagatcgtggacacgctgcccgaccgcggccgctcctgctggcatctgggtgcagtgtgggcgctgagccagttccaggaaaacgagctgttcctgggcatgtacccagaagagcattttatcgagaagcctgtgaaggaagccatggcccgattccgcaagaacctcgaggccattgtcagcgtgattgctgagcgcaacaagaagaagcagctgccatattactacttgtccccagaccggattccgaacagtgtggccatctgagcacactgccagtctcactgtgggaaggccagctgccccagccagatggactccagcctgcctggcaggctgtctggccaggcctcttggcagtcacatctcttcctccgaggccagtacctttccatttattctttgatcttcagggaactgcatagattgatcaaagtgtaaacaccatagggacccattctacacagagcaggactgcacagcgtcctgtccacacccagctcagcatttccacaccaagcagcaacagcaaatcacgaccactgatagatgtctattcttgttggagacatgggatgattattttctgttctatttgtgcttagtccaattccttgcacatagtaggtacccaattcaattactattgaatgaattaagaattggttgccataaaaataaatcagttcatttaaaatgaaaaaaaaaaaaaaaaaaaa

SEQ ID NO: 544 - protein, 674 aa, Homo Sapiens
MPSYTVTVATGSQWFAGTDDYIYLSLVGSAGCSEKHLLDKPFYNDFERGAVDSYDVTVDEELGEIQLVRIEKRKYWLNDDWYLKYITLKTPHGDYIEFPCYRWITGDVEVVLRDGRAKLARDDQIHILKQHRRKELETRQKQYRWMEWNPGFPLSIDAKCHKDLPRDIQFDSEKGVDFVLNYSKAMENLFINRFMHMFQSSWNDFADFEKIFVKISNTISERVMNHWQEDLMFGYQFLNGCNPVLIRRCTELPEKLPVTTEMVECSLERQLSLEQEVQQGNIFIVDFELLDGIDANKTDPCTLQFLAAPICLLYKNLANKIVPIAIQLNQIPGDENPIFLPSDAKYDWLLAKIWVRSSDFHVHQTITHLLRTHLVSEVFGIAMYRQLPAVHPIFKLLVAHVRFTIAINTKAREQLICECGLFDKANATGGGGHVQMVQRAMKDLTYASLCFPEAIKARGMESKEDIPYYFYRDDGLLVWEAIRTFTAEVVDIYYEGDQVVEEDPELQDFVNDVYVYGMRGRKSSGFPKSVKSREQLSEYLTVVIFTASAQHAAVNFGQYDWCSWIPNAPPTMRAPPPTAKGVVTIEQIVDTLPDRGRSCWHLGAVWALSQFQENELFLGMYPEEHFIEKPVKEAMARFRKNLEAIVSVIAERNKKKQLPYYYLSPDRIPNSVAI

SEQ ID NO: 545 - DNA, 466 bp, Homo Sapiens
gggaggagagaaaagccatggccgacaaggtcctgaaggagaagagaaagcagtttatccgttcagtgggcgaaggtacaataaatggcttactgggtgaattattggagacaagggtgctgagccaggaagagatagagatagtaaaatgtgaaaatgctacagttatggataaggcccgagctttgcttgactctgttattcggaaaggggctccagcatgccaaatttgcatcacatacatttgtgaagaagacagtcacctggcagggacgctgggactctcagcaggtccaacatctggaaatcaccttactacacaagattctcaaatagtacttccttcctaggttcaactttcatttgagcagccagatgataaagcacagatgcccagcactgaaagagttacttcgacaagacgtttctatctcttcccagtacattaaaataaggaagctgtatg

SEQ ID NO: 546 - protein, 110 aa, Homo Sapiens
MADKVLKEKRKQFIRSVGEGTINGLLGELLETRVLSQEEIEIVKCENATVMDKARALLDSVIRKGAPACQICITYICEEDSHLAGTLGLSAGPTSGNHLTTQDSQIVLPS

SEQ ID NO: 547 - DNA, 5810 bp, Homo Sapiens
aacgggctcattcagcggtcgcgagctgcccgcgagggggagcggccggacggagagcgcgacccgtcccgggggtggggccgggcgcagcggcgagaggaggcgaaggtggctgcggtagcagcagcgcggcagcctcggacccagcccggagcgcagggcggccgctgcaggtccccgctcccctccccgtgcgtccgcccatggccgccgccgggcagctgtgcttgctctacctgtcggcggggctcctgtcccggctcggcgcagccttcaacttggacactcgggaggacaacgtgatccggaaatatggagaccccgggagcctcttcggcttctcgctggccatgcactggcaactgcagcccgaggacaagcggctgttgctcgtgggggccccgcgggcagaagcgcttccactgcagagagccaacagaacgggagggctgtacagctgcgacatcaccgcccgggggccatgcacgcggatcgagtttgataacgatgctgaccccacgtcagaaagcaaggaagatcagtggatgggggtcaccgtccagagccaaggtccagggggcaaggtcgtgacatgtgctcaccgatatgaaaaaaggcagcatgttaatacgaagcaggaatcccgagacatctttgggcggtgttatgtcctgagtcagaatctcaggattgaagacgatatggatgggggagattggagcttttgtgatgggcgattgagaggccatgagaaatttggctcttgccagcaaggtgtagcagctacttttactaaagactttcattacattgtatttggagccccgggtacttataactggaaagggattgttcgtgtagagcaaaagaataacactttttttgacatgaacatctttgaagatgggccttatgaagttggtggagagactgagcatgatgaaagtctcgttcctgttcctgctaacagttacttaggtttttctttggactcagggaaaggtattgtttctaaagatgagatcacttttgtatctggtgctcccagagccaatcacagtggagccgtggttttgctgaagagagacatgaagtctgcacatctcctccctgagcacatattcgatggagaaggtctggcctcttcatttggctatgatgtggcggtggtggacctcaacaaggatgggtggcaagatatagttattggagccccacagtattttgatagagatggagaagttggaggtgcagtgtatgtctacatgaaccagcaaggcagatggaataatgtgaagccaattcgtcttaatggaaccaaagattctatgtttggcattgcagtaaaaaatattggagatattaatcaagatggctacccagatattgcagttggagctccgtatgatgacttgggaaaggtttttatctatcatggatctgcaaatggaataaataccaaaccaacacaggttctcaagggtatatcaccttattttggatattcaattgctggaaacatggaccttgatcgaaattcctaccctgatgttgctgttggttccctctcagattcagtaactattttcagatcccggcctgtgattaatattcagaaaaccatcacagtaactcctaacagaattgacctccgccagaaaacagcgtgtggggcgcctagtgggatatgcctccaggttaaatcctgttttgaatatactgctaaccccgctggttataatccttcaatatcaattgtgggcacacttgaagctgaaaaagaaagaagaaaatctgggctatcctcaagagttcagtttcgaaaccaaggttctgagcccaaatatactcaagaactaactctgaagaggcagaaacagaaagtgtgcatggaggaaaccctgtggctacaggataatatcagagataaactgcgtcccattcccataactgcctcagtggagatccaagagccaagctctcgtaggcgagtgaattcacttccagaagttcttccaattctgaattcagatgaacccaagacagctcatattgatgttcacttcttaaaagagggatgtggagacgacaatgtatgtaacagcaaccttaaactagaatataaattttgcacccgagaaggaaatcaagacaaattttcttatttaccaattcaaaaaggtgtaccagaactagttctaaaagatcagaaggatattgctttagaaataacagtgacaaacagcccttccaacccaaggaatcccacaaaagatggcgatgacgcccatgaggctaaactgattgcaacgtttccagacactttaacctattctgcatatagagaactgagggctttccctgagaaacagttgagttgtgttgccaaccagaatggctcgcaagctgactgtgagctcggaaatccttttaaaagaaattcaaatgtcactttttatttggttttaagtacaactgaagtcacctttgacaccccagatctggatattaatctgaagttagaaacaacaagcaatcaagataatttggctccaattacagctaaagcaaaagtggttattgaactgcttttatcggtctcgggagttgctaaaccttcccaggtgtattttggaggtacagttgttggcgagcaagctatgaaatctgaagatgaagtgggaagtttaatagagtatgaattcagggtaataaacttaggtaaacctcttacaaacctcggcacagcaaccttgaacattcagtggccaaaagaaattagcaatgggaaatggttgctttatttggtgaaagtagaatccaaaggattggaaaaggtaacttgtgagccacaaaaggagataaactccctgaacctaacggagtctcacaactcaagaaagaaacgggaaattactgaaaaacagatagatgataacagaaaattttctttatttgctgaaagaaaataccagactcttaactgtagcgtgaacgtgaactgtgtgaacatcagatgcccgctgcgggggctggacagcaaggcgtctcttattttgcgctcgaggttatggaacagcacatttctagaggaatattccaaactgaactacttggacattctcatgcgagccttcattgatgtgactgctgctgccgaaaatatcaggctgccaaatgcaggcactcaggttcgagtgactgtgtttccctcaaagactgtagctcagtattcgggagtaccttggtggatcatcctagtggctattctcgctgggatcttgatgcttgctttattagtgtttatactatggaagtgtggtttcttcaagagaaataagaaagatcattatgatgccacatatcacaaggctgagatccatgctcagccatctgataaagagaggcttacttctgatgcatagtattgatctacttctgtaattgtgtggattctttaaacgctctaggtacgatgacagtgttccccgataccatgctgtaaggatccggaaagaagagcgagagatcaaagatgaaaagtatattgataaccttgaaaaaaaacagtggatcacaaagtggaacgaaaatgaaagctactcatagcgggggcctaaaaaaaaaaagcttcacagtacccaaactgctttttccaactcagaaattcaatttggatttaaaagcctgctcaatccctgaggactgatttcagagtgactacacacagtacgaacctacagttttaactgtggatattgttacgtagcctaaggctcctgttttgcacagccaaatttaaaactgttggaatggatttttctttaactgccgtaatttaactttctgggttgcctttatttttggcgtggctgacttacatcatgtgttggggaagggcctgcccagttgcactcaggtgacatcctccagatagtgtagctgaggaggcacctacactcacctgcactaacagagtggccgtcctaacctcgggcctgctgcgcagacgtccatcacgttagctgtcccacatcacaagactatgccattggggtagttgtgtttcaacggaaagtgctgtcttaaactaaatgtgcaatagaaggtgatgttgccatcctaccgtcttttcctgtttcctagctgtgtgaatacctgctcacgtcaaatgcatacaagtttcattctccctttcactaaaacacacaggtgcaacagacttgaatgctagttatacttatttgtatatggtatttattttttcttttctttacaaaccattttgttattgactaacaggccaaagagtctccagtttacccttcaggttggtttaatcaatcagaattagagcatgggaggtcatcactttgacctaaattatttactgcaaaaagaaaatctttataaatgtaccagagagagttgttttaataacttatctataaactataacctctccttcatgacagcctccaccccacaacccaaaaggtttaagaaatagaattataactgtaaagatgtttatttcaggcattggatattttttactttagaagcctgcataatgtttctggatttcatactgtaacattcaggaattcttggagaaaatgggtttattcactgaactctagtgcggtttactcactgctgcaaatactgtatattcaggacttgaaagaaatggtgaatgcctatggtggatccaaactgatccagtataagactactgaatctgctaccaaaacagttaatcagtgagtcgatgttctattttttgttttgtttcctcccctatctgtattcccaaaaattactttggggctaatttaacaagaactttaaattgtgttttaattgtaaaaatggcagggggtggaattattactctatacattcaacagagactgaatagatatgaaagctgattttttttaattaccatgcttcacaatgttaagttatatggggagcaacagcaaacaggtgctaatttgttttggatatagtataagcagtgtctgtgttttgaaagaatagaacacagtttgtagtgccactgttgttttgggggggcttttttcttttcggaaatcttaaaccttaagatactaaggacgttgttttggttgtactttggaattcttagtcacaaaatatattttgtttacaaaaatttctgtaaaacaggttataacagtgtttaaagtctcagtttcttgcttggggaacttgtgtccctaatgtgtttagattgctagattgctaaggagctgatactttgacagtgtttttagacctgtgttactaaaaaaaagatgaatgtcctgaaaagggtgttgggagggtggttcaacaaagaaacaaagatgttatggtgtttagatttatggttgttaaaaatgtcatctcaagtcaagtcactggtctgtttgcatttgatacatttttgtactaactagcattgtaaaattatttcatgattagaaattacctgtggatatttgtataaaagtgtgaaataaattttttataaaagtgttcattgtttcgtaacacagcattgtatatgtgaagcaaactctaaaattataaatgacaacctgaattatctatttcatcaaaccaaagttcagtgtttttatttttggtgtctcatgtaatctcagatcagccaaagatactagtgccaaagcaatgggattcggggtttttttctgttttcgctctatgtaggtgatcctcaagtctttcattttccttctttatgattaaaagaaacctacaggtatttaacaacc

SEQ ID NO: 548 - protein, 1073 aa, Homo Sapiens
MAAAGQLCLLYLSAGLLSRLGAAFNLDTREDNVIRKYGDPGSLFGFSLAMHWQLQPEDKRLLLVGAPRAEALPLQRANRTGGLYSCDITARGPCTRIEFDNDADPTSESKEDQWMGVTVQSQGPGGKVVTCAHRYEKRQHVNTKQESRDIFGRCYVLSQNLRIEDDMDGGDWSFCDGRLRGHEKFGSCQQGVAATFTKDFHYIVFGAPGTYNWKGIVRVEQKNNTFFDMNIFEDGPYEVGGETEHDESLVPVPANSYLGFSLDSGKGIVSKDEITFVSGAPRANHSGAVVLLKRDMKSAHLLPEHIFDGEGLASSFGYDVAVVDLNKDGWQDIVIGAPQYFDRDGEVGGAVYVYMNQQGRWNNVKPIRLNGTKDSMFGIAVKNIGDINQDGYPDIAVGAPYDDLGKVFIYHGSANGINTKPTQVLKGISPYFGYSIAGNMDLDRNSYPDVAVGSLSDSVTIFRSRPVINIQKTITVTPNRIDLRQKTACGAPSGICLQVKSCFEYTANPAGYNPSISIVGTLEAEKERRKSGLSSRVQFRNQGSEPKYTQELTLKRQKQKVCMEETLWLQDNIRDKLRPIPITASVEIQEPSSRRRVNSLPEVLPILNSDEPKTAHIDVHFLKEGCGDDNVCNSNLKLEYKFCTREGNQDKFSYLPIQKGVPELVLKDQKDIALEITVTNSPSNPRNPTKDGDDAHEAKLIATFPDTLTYSAYRELRAFPEKQLSCVANQNGSQADCELGNPFKRNSNVTFYLVLSTTEVTFDTPDLDINLKLETTSNQDNLAPITAKAKVVIELLLSVSGVAKPSQVYFGGTVVGEQAMKSEDEVGSLIEYEFRVINLGKPLTNLGTATLNIQWPKEISNGKWLLYLVKVESKGLEKVTCEPQKEINSLNLTESHNSRKKREITEKQIDDNRKFSLFAERKYQTLNCSVNVNCVNIRCPLRGLDSKASLILRSRLWNSTFLEEYSKLNYLDILMRAFIDVTAAAENIRLPNAGTQVRVTVFPSKTVAQYSGVPWWIILVAILAGILMLALLVFILWKCGFFKRNKKDHYDATYHKAEIHAQPSDKERLTSDA

SEQ ID NO: 549 - DNA, 758 bp, Homo Sapiens
gtcctgtgaagcaatagccaggggctaaagcaaaccccagcccacaccctggcaggcagccagggatgggtggatcaggaaggctcctggttgggcttttgcatcaggctcaggctgggcataaaggaggctcctgtgggctagagggaggcagacatggggaccatgaagacccaaagggatggccactccctggggcggtggtcactggtgctcctgctgctgggcctggtgatgcctctggccatcattgcccaggtcctcagctacaaggaagctgtgcttcgtgctatagatggcatcaaccagcggtcctcggatgctaacctctaccgcctcctggacctggaccccaggcccacgatggatggggacccagacacgccaaagcctgtgagcttcacagtgaaggagacagtgtgccccaggacgacacagcagtcaccagaggattgtgacttcaagaaggacgggctggtgaagcggtgtatggggacagtgaccctcaaccaggccaggggctcctttgacatcagttgtgataaggataacaagagatttgccctgctgggtgatttcttccggaaatctaaagagaagattggcaaagagtttaaaagaattgtccagagaatcaaggattttttgcggaatcttgtacccaggacagagtcctagtgtgtgccctaccctggctcaggcttctgggctctgagaaataaactatgagagcaatttcctcaggaaaaaaaaaaaaa

SEQ ID NO: 550 - protein, 173 aa, Homo Sapiens
MGTMKTQRDGHSLGRWSLVLLLLGLVMPLAIIAQVLSYKEAVLRAIDGINQRSSDANLYRLLDLDPRPTMDGDPDTPKPVSFTVKETVCPRTTQQSPEDCDFKKDGLVKRCMGTVTLNQARGSFDISCDKDNKRFALLGDFFRKSKEKIGKEFKRIVQRIKDFLRNLVPRTES

SEQ ID NO: 551 - DNA, 3487 bp, Homo Sapiens
cccctaggggcccctgggacgaggaggaagcgccaggtccttcccgccgccgccgccgccgccgccgcctgctcccctggcacgcgccccgccgccctcggcagccgcagctccgtgtcccctgagaaccagccgtcccgcgccatgggcacgcgtctgccgctcgtcctgcgccagctccgccgcccgccccagcccccgggccctccgcgccgcctccgtgtgccctgtcgcgctagcagcggcggcggcggaggcggcggcggtggccgggagggcctgcttggacagcggcggccgcaggatggccaggcccggagcagctgcagccccggcggccgaacgcccgcggcgcgggactccatcgtcagagaagtcattcagaattcaaaagaagttctaagtttattgcaagaaaaaaaccctgccttcaagccggttcttgcaattatccaggcaggtgacgacaacttgatgcaggaaatcaaccagaatttggctgaggaggctggtctgaacatcactcacatttgcctccctccagatagcagtgaagccgagattatagatgaaatcttaaagatcaatgaagataccagagtacatggccttgcccttcagatctctgagaacttgtttagcaacaaagtcctcaatgccttgaaaccagaaaaagatgtggatggagtaacagacataaacctggggaagctggtgcgaggggatgcccatgaatgttttgtttcacctgttgccaaagctgtaattgaacttcttgaaaaatcaggtgtcaacctagatggaaagaagattttggtagtgggggcccatgggtctttggaagctgctctacaatgcctgttccagagaaaagggtccatgacaatgagcatccagtggaaaacacgccagcttcaaagcaagcttcacgaggctgacattgtggtcctaggctcacctaagccagaagagattccccttacttggatacaaccaggaactactgttctcaactgctcccatgacttcctgtcagggaaggttgggtgtggctctccaagaatacattttggtggactcattgaggaagatgatgtgattctccttgctgcagctctgcgaattcagaacatggtcagtagtggaaggagatggcttcgtgaacagcagcacaggcggtggagacttcactgcttgaaacttcagcctctctcccctgtgccaagtgacattgagatttcaagaggacaaactccaaaagctgtggatgtccttgccaaggagattggattgcttgcagatgaaattgaaatctatggcaaaagcaaagccaaagtacgtttgtccgtgctagaaaggttaaaggatcaagcagatggaaaatacgtcttagttgctgggatcacacccacccctcttggagaagggaagagcacagtcaccatcgggcttgtgcaggctctgaccgcacacctgaatgtcaactcctttgcctgcttgaggcagccttcccaaggaccgacgtttggagtgaaaggaggagccgcgggtggtggatatgcccaggtcatccccatggaggagttcaaccttcacttgactggagacatccacgccatcaccgctgccaataacttgctggctgccgccatcgacacgaggattcttcatgaaaacacgcaaacagataaggctctgtataatcggctggttcctttagtgaatggtgtcagagaattttcagaaattcagcttgctcggctaaaaaaactgggaataaataagactgatccgagcacactgacagaagaggaagtgagtaaatttgcccgtctcgacatcgacccatctaccatcacgtggcagagagtattggatacaaatgaccgatttctacgaaaaataaccatcgggcagggaaacacagagaagggccattaccggcaggcgcagtttgacatcgcagtggccagcgagatcatggcggtgctggccctgacggacagcctcgcagacatgaaggcacggctgggaaggatggtggtggccagtgacaaaagcgggcagcctgtgacagcagatgatttgggggtgacaggtgctttgacagttttgatgaaagatgcaataaaaccaaacctgatgcagaccctggaagggacacctgtgttcgtgcatgcgggcccttttgctaacattgctcacggcaactcttcagtgttggctgataaaattgccctgaaactggttggtgaagaaggatttgtagtgaccgaagctggctttggtgctgacatcggaatggagaaattcttcaacatcaagtgccgagcttccggcttggtgcccaacgtggttgtgttagtggcaacggtgcgagctctgaagatgcatggaggcgggccaagtgtaacggctggtgttcctcttaagaaagaatatacagaggagaacatccagctggtggcagacggctgctgtaacctccagaagcaaattcagatcactcagctctttggggttcccgttgtggtggctctgaatgtcttcaagaccgacacccgcgctgagattgacttggtgtgtgagcttgcaaagcgggctggtgcctttgatgcagtcccctgctatcactggtccgttggtggaaaaggatcggtggacttggctcgggctgtgagagaggctgcgagtaaaagaagccgattccagttcctgtatgatgttcaggttccaattgtggacaagataaggaccattgctcaggctgtctatggagccaaagatattgaactctctcctgaggcacaagccaaaatagatcgttacactcaacagggttttggaaatttgcccatctgcatggcaaagacccacctttctctatctcaccaacctgacaaaaaaggtgtgccaagggacttcatcttacctatcagtgacgtccgggccagcataggcgctgggttcatttaccctttggtcggaacgatgagcaccatgccaggactgcccacccggccctgcttttatgacatagatcttgataccgaaacagaacaagttaaaggcttgttctaagtggacaaggctctcacaggacccgatgcagactcctgaaacagactactctttgcctttttgctgcagttggagaagaaactgaatttgaaaaatgtctgttatgcaatgctggagacatggtgaaataggccaaagatttcttcttcgttcaagatgaattctgttcacagtggagtatggtgttcggcaaaaggacctccaccaagactgaaagaaactaatttatttctgtttctgtggagtttccattatttctactgcttacactttagaatgtttattttatggggactaagggattaggagtgtgaactaaaaggtaacattttccactctcaagttttctactttgtctttgaactgaaaataaacatggatctagaaaaccaaaaaaaaaaaaaaa

SEQ ID NO: 552 - protein, 978 aa, Homo Sapiens
MGTRLPLVLRQLRRPPQPPGPPRRLRVPCRASSGGGGGGGGGREGLLGQRRPQDGQARSSCSPGGRTPAARDSIVREVIQNSKEVLSLLQEKNPAFKPVLAIIQAGDDNLMQEINQNLAEEAGLNITHICLPPDSSEAEIIDEILKINEDTRVHGLALQISENLFSNKVLNALKPEKDVDGVTDINLGKLVRGDAHECFVSPVAKAVIELLEKSGVNLDGKKILVVGAHGSLEAALQCLFQRKGSMTMSIQWKTRQLQSKLHEADIVVLGSPKPEEIPLTWIQPGTTVLNCSHDFLSGKVGCGSPRIHFGGLIEEDDVILLAAALRIQNMVSSGRRWLREQQHRRWRLHCLKLQPLSPVPSDIEISRGQTPKAVDVLAKEIGLLADEIEIYGKSKAKVRLSVLERLKDQADGKYVLVAGITPTPLGEGKSTVTIGLVQALTAHLNVNSFACLRQPSQGPTFGVKGGAAGGGYAQVIPMEEFNLHLTGDIHAITAANNLLAAAIDTRILHENTQTDKALYNRLVPLVNGVREFSEIQLARLKKLGINKTDPSTLTEEEVSKFARLDIDPSTITWQRVLDTNDRFLRKITIGQGNTEKGHYRQAQFDIAVASEIMAVLALTDSLADMKARLGRMVVASDKSGQPVTADDLGVTGALTVLMKDAIKPNLMQTLEGTPVFVHAGPFANIAHGNSSVLADKIALKLVGEEGFVVTEAGFGADIGMEKFFNIKCRASGLVPNVVVLVATVRALKMHGGGPSVTAGVPLKKEYTEENIQLVADGCCNLQKQIQITQLFGVPVVVALNVFKTDTRAEIDLVCELAKRAGAFDAVPCYHWSVGGKGSVDLARAVREAASKRSRFQFLYDVQVPIVDKIRTIAQAVYGAKDIELSPEAQAKIDRYTQQGFGNLPICMAKTHLSLSHQPDKKGVPRDFILPISDVRASIGAGFIYPLVGTMSTMPGLPTRPCFYDIDLDTETEQVKGLF

SEQ ID NO: 553 - DNA, 5035 bp, Homo Sapiens
agtgcgcggtcgctccgcgcctgcgcaggagaggtggtaggctcgggtggctggctccggggagatagcgcctgtcagtcggtgggtcggtcctcgcgccggccctccccctccccggtctccgggggaggcgcggtggagtccgcccccggggttctccgatgggggagaagcggcgacggcggcagtggagtaaccgagccggagcgtgagcggccccggtgccccgttccccacggaggccatgggcgacccagcccccgcccgcagcctggacgacatcgacctgtccgccctgcgggaccctgctgggatctttgagcttgtggaggtggtcggcaatggaacctacggacaggtgtacaagggtcggcatgtcaagacggggcagctggctgccatcaaggtcatggatgtcacggaggacgaggaggaagagatcaaacaggagatcaacatgctgaaaaagtactctcaccaccgcaacatcgccacctactacggagccttcatcaagaagagccccccgggaaacgatgaccagctctggctggtgatggagttctgtggtgctggttcagtgactgacctggtaaagaacacaaaaggcaacgccctgaaggaggactgtatcgcctatatctgcagggagatcctcaggggtctggcccatctccatgcccacaaggtgatccatcgagacatcaaggggcagaatgtgctgctgacagagaatgctgaggtcaagctagtggattttggggtgagtgctcagctggaccgcaccgtgggcagacggaacactttcattgggactccctactggatggctccagaggtcatcgcctgtgatgagaaccctgatgccacctatgattacaggagtgatatttggtctctaggaatcacagccatcgagatggcagagggagccccccctctgtgtgacatgcaccccatgcgagccctcttcctcattcctcggaaccctccgcccaggctcaagtccaagaagtggtctaagaagttcattgacttcattgacacatgtctcatcaagacttacctgagccgcccacccacggagcagctactgaagtttcccttcatccgggaccagcccacggagcggcaggtccgcatccagcttaaggaccacattgaccgatcccggaagaagcggggtgagaaagaggagacagaatatgagtacagcggcagcgaggaggaagatgacagccatggagaggaaggagagccaagctccatcatgaacgtgcctggagagtcgactctacgccgggagtttctccggctccagcaggaaaataagagcaactcagaggctttaaaacagcagcagcagctgcagcagcagcagcagcgagaccccgaggcacacatcaaacacctgctgcaccagcggcagcggcgcatagaggagcagaaggaggagcggcgccgcgtggaggagcaacagcggcgggagcgggagcagcggaagctgcaggagaaggagcagcagcggcggctggaggacatgcaggctctgcggcgggaggaggagcggcggcaggcggagcgcgagcaggaatacaagcggaagcagctggaggagcagcggcagtcagaacgtctccagaggcagctgcagcaggagcatgcctacctcaagtccctgcagcagcagcaacagcagcagcagcttcagaaacagcagcagcagcagctcctgcctggggacaggaagcccctgtaccattatggtcggggcatgaatcccgctgacaaaccagcctgggcccgagaggtagaagagagaacaaggatgaacaagcagcagaactctcccttggccaagagcaagccaggcagcacggggcctgagccccccatcccccaggcctccccagggcccccaggacccctttcccagactcctcctatgcagaggccggtggagccccaggagggaccgcacaagagcctggtggcacaccgggtcccactgaagccatatgcagcacctgtaccccgatcccagtccctgcaggaccagcccacccgaaacctggctgccttcccagcctcccatgaccccgaccctgccatccccgcacccactgccacgcccagtgcccgaggagctgtcatccgccagaattcagaccccacctctgaaggacctggccccagcccgaatcccccagcctgggtccgcccagataacgaggccccacccaaggtgcctcagaggacctcatctatcgccactgcccttaacaccagtggggccggagggtcccggccagcccaggcagtccgtgccagacctcgcagcaactccgcctggcaaatctatctgcaaaggcgggcagagcggggcaccccaaagcctccagggccccctgctcagccccctggcccgcccaacgcctctagtaaccccgacctcaggaggagcgaccctggctgggaacgctcggacagcgtccttccagcctctcacgggcacctcccccaggctggctcactggagcggaaccgcgtgggagtctcctccaaaccggacagctcccctgtgctctcccctgggaataaagccaagcccgacgaccaccgctcacggccaggccggcccgcagactttgtgttgctgaaagagcggactctggacgaggcccctcggcctcccaagaaggccatggactactcgtcgtccagcgaggaggtggaaagcagtgaggacgacgaggaggaaggcgaaggcgggccagcagaggggagcagagatacccctgggggccgcagcgatggggatacagacagcgtcagcaccatggtggtccacgacgtcgaggagatcaccgggacccagcccccatacgggggcggcaccatggtggtccagcgcacccctgaagaggagcggaacctgctgcatgctgacagcaatgggtacacaaacctgcctgacgtggtccagcccagccactcacccaccgagaacagcaaaggccaaagcccaccctcgaaggatgggagtggtgactaccagtctcgtgggctggtaaaggcccctggcaagagctcgttcacgatgtttgtggatctagggatctaccagcctggaggcagtggggacagcatccccatcacagccctagtgggtggagagggcactcggctcgaccagctgcagtacgacgtgaggaagggttctgtggtcaacgtgaatcccaccaacacccgggcccacagtgagacccctgagatccggaagtacaagaagcgattcaactccgagatcctctgtgcagccctttggggggtcaacctgctggtgggcacggagaacgggctgatgttgctggaccgaagtgggcagggcaaggtgtatggactcattgggcggcgacgcttccagcagatggatgtgctggaggggctcaacctgctcatcaccatctcagggaaaaggaacaaactgcgggtgtattacctgtcctggctccggaacaagattctgcacaatgacccagaagtggagaagaagcagggctggaccaccgtgggggacatggagggctgcgggcactaccgtgttgtgaaatacgagcggattaagttcctggtcatcgccctcaagagctccgtggaggtgtatgcctgggcccccaaaccctaccacaaattcatggccttcaagtcctttgccgacctcccccaccgccctctgctggtcgacctgacagtagaggaggggcagcggctcaaggtcatctatggctccagtgctggcttccatgctgtggatgtcgactcggggaacagctatgacatctacatccctgtgcacatccagagccagatcacgccccatgccatcatcttcctccccaacaccgacggcatggagatgctgctgtgctacgaggacgagggtgtctacgtcaacacgtacgggcgcatcattaaggatgtggtgctgcagtggggggagatgcctacttctgtggcctacatctgctccaaccagataatgggctggggtgagaaagccattgagatccgctctgtggagacgggccacctcgacggggtcttcatgcacaaacgagctcagaggctcaagttcctgtgtgagcggaatgacaaggtgttttttgcctcagtccgctctgggggcagcagccaagtttacttcatgactctgaaccgtaactgcatcatgaactggtgacggggccctgggctggggctgtcccacactggacccagctctccccctgcagccaggcttcccgggccgcccctctttcccctccctgggcttttgcttttactggtttgatttcactggagcctgctgggaacgtgacctctgacccctgatgctttcgtgatcacgtgaccatcctcttccccaacatgtcctcttcccaaaactgtgcctgtccccagcttctggggagggacacagcttccccttcccaggaattgagtgggcctagcccctccccccttttctccatttgagaggagagtgcttggggcttgaaccccttaccccactgctgctgactgggcagggccctggacccctttatttgcacgtcaggggagccggctccccccttgaatgtaccagaccctggggggggtcactgggccctagatttttggggggtcaccagccactccaggggcagggaccatttcttcattttctgaaagcactttaatgattccccttcccccaaactccagggaatggaggggggaccccgccagccaaaacattccccccattcccgacccccctctcctcttctagcccatgcccttccccggtggagggagggagcagggagccctcactctccacgccccttgcttgcatctgtatatagtgtgagcagcaagtaacccttctccctccccccccacccctcctcaatgtagtggccttggatatcctgtttgttaataaagacaattcaaccagctcccaccaaaaaaaaaaaaaaaaaaa

SEQ ID NO: 554 - protein, 1332 aa, Homo Sapiens
MGDPAPARSLDDIDLSALRDPAGIFELVEVVGNGTYGQVYKGRHVKTGQLAAIKVMDVTEDEEEEIKQEINMLKKYSHHRNIATYYGAFIKKSPPGNDDQLWLVMEFCGAGSVTDLVKNTKGNALKEDCIAYICREILRGLAHLHAHKVIHRDIKGQNVLLTENAEVKLVDFGVSAQLDRTVGRRNTFIGTPYWMAPEVIACDENPDATYDYRSDIWSLGITAIEMAEGAPPLCDMHPMRALFLIPRNPPPRLKSKKWSKKFIDFIDTCLIKTYLSRPPTEQLLKFPFIRDQPTERQVRIQLKDHIDRSRKKRGEKEETEYEYSGSEEEDDSHGEEGEPSSIMNVPGESTLRREFLRLQQENKSNSEALKQQQQLQQQQQRDPEAHIKHLLHQRQRRIEEQKEERRRVEEQQRREREQRKLQEKEQQRRLEDMQALRREEERRQAEREQEYKRKQLEEQRQSERLQRQLQQEHAYLKSLQQQQQQQQLQKQQQQQLLPGDRKPLYHYGRGMNPADKPAWAREVEERTRMNKQQNSPLAKSKPGSTGPEPPIPQASPGPPGPLSQTPPMQRPVEPQEGPHKSLVAHRVPLKPYAAPVPRSQSLQDQPTRNLAAFPASHDPDPAIPAPTATPSARGAVIRQNSDPTSEGPGPSPNPPAWVRPDNEAPPKVPQRTSSIATALNTSGAGGSRPAQAVRARPRSNSAWQIYLQRRAERGTPKPPGPPAQPPGPPNASSNPDLRRSDPGWERSDSVLPASHGHLPQAGSLERNRVGVSSKPDSSPVLSPGNKAKPDDHRSRPGRPADFVLLKERTLDEAPRPPKKAMDYSSSSEEVESSEDDEEEGEGGPAEGSRDTPGGRSDGDTDSVSTMVVHDVEEITGTQPPYGGGTMVVQRTPEEERNLLHADSNGYTNLPDVVQPSHSPTENSKGQSPPSKDGSGDYQSRGLVKAPGKSSFTMFVDLGIYQPGGSGDSIPITALVGGEGTRLDQLQYDVRKGSVVNVNPTNTRAHSETPEIRKYKKRFNSEILCAALWGVNLLVGTENGLMLLDRSGQGKVYGLIGRRRFQQMDVLEGLNLLITISGKRNKLRVYYLSWLRNKILHNDPEVEKKQGWTTVGDMEGCGHYRVVKYERIKFLVIALKSSVEVYAWAPKPYHKFMAFKSFADLPHRPLLVDLTVEEGQRLKVIYGSSAGFHAVDVDSGNSYDIYIPVHIQSQITPHAIIFLPNTDGMEMLLCYEDEGVYVNTYGRIIKDVVLQWGEMPTSVAYICSNQIMGWGEKAIEIRSVETGHLDGVFMHKRAQRLKFLCERNDKVFFASVRSGGSSQVYFMTLNRNCIMNW

SEQ ID NO: 555 - DNA, 2724 bp, Homo Sapiens
cccgcccctggctagccgcgcccgcccccgcgctcctgcttcctcccctctttccctccccgcctcccaggcgcgcacccctcccctcgcgcccctcccgcgccctacatccaccgcccggcggagggggctcagtccgcagccgccgccgccaccgccgcgcctcggcctcggtgcaggcagcggccgccgccgccgagacagctgcgcgggcgagcatccccacgcagcaccttggaagttgttttcaaccatatccagcctttgccgaatacatcctatctgccacacatccagcgtgaggtccctccagctacaaggtgggcaccatggcggagaagtttgactgccactactgcagggatcccttgcaggggaagaagtatgtgcaaaaggatggccaccactgctgcctgaaatgctttgacaagttctgtgccaacacctgtgtggaatgccgcaagcccatcggtgcggactccaaggaggtgcactataagaaccgcttctggcatgacacctgcttccgctgtgccaagtgccttcaccccttggccaatgagacctttgtggccaaggacaacaagatcctgtgcaacaagtgcaccactcgggaggactcccccaagtgcaaggggtgcttcaaggccattgtggcaggagatcaaaacgtggagtacaaggggaccgtctggcacaaagactgcttcacctgtagtaactgcaagcaagtcatcgggactggaagcttcttccctaaaggggaggacttctactgcgtgacttgccatgagaccaagtttgccaagcattgcgtgaagtgcaacaaggccatcacatctggaggaatcacttaccaggatcagccctggcatgccgattgctttgtgtgtgttacctgctctaagaagctggctgggcagcgtttcaccgctgtggaggaccagtattactgcgtggattgctacaagaactttgtggccaagaagtgtgctggatgcaagaaccccatcactgggaaaaggactgtgtcaagagtgagccacccagtctctaaagctaggaagcccccagtgtgccacgggaaacgcttgcctctcaccctgtttcccagcgccaacctccggggcaggcatccgggtggagagaggacttgtccctcgtgggtggtggttctttatagaaaaaatcgaagcttagcagctcctcgaggcccgggtttggtaaaggctccagtgtggtggcctatgaaggacaatcctggcacgactactgcttccactgcaaaaaatgctccgtgaatctggccaacaagcgctttgttttccaccaggagcaagtgtattgtcccgactgtgccaaaaagctgtaaactgacaggggctcctgtcctgtaaaatggcatttgaatctcgttctttgtgtccttactttctgccctataccatcaataggggaagagtggtccttcccttctttaaagttctccttccgtcttttctcccattttacagtattactcaaataagggcacacagtgatcatattagcatttagcaaaaagcaaccctgcagcaaagtgaatttctgtccggctgcaatttaaaaatgaaaacttaggtagattgactcttctgcatgtttctcatagagcagaaaagtgctaatcatttagccacttagtgatgtaagcaagaagcataggagataaaacccccactgagatgcctctcatgcctcagctgggacccaccgtgtagacacacgacatgcaagagttgcagcggctgctccaactcactgctcaccctcttctgtgagcaggaaaagaaccctactgacatgcatggtttaacttcctcatcagaactctgcccttccttctgttcttttgtgctttcaaataactaacacgaacttccagaaaattaacatttgaacttagctgtaattctaaactgacctttccccgtactaacgtttggtttccccgtgtggcatgttttctgagcgttcctactttaaagcatggaacatgcaggtgatttgggaagtgtagaaagacctgagaaaacgagcctgtttcagaggaacatcgtcacaacgaatacttctggaagcttaacaaaactaaccctgctgtcctttttattgtttttaattaatatttttgttttaattgatagcaaaatagtttatgggtttggaaacttgcatgaaaatattttagccccctcagatgttcctgcagtgctgaaattcatcctacggaagtaaccgcaaaactctagagggggagttgagcaggcgccagggctgtcatcaacatggatatgacatttcacaacagtgactagttgaatcccttgtaacgtagtagttgtctgctctttgtccatgtgttaatgaggactgcaaagtcccttctgttgtgattcctaggacttttcctcaagaggaaatctggatttccacctaccgcttacctgaaatgcaggatcacctacttactgtattctacattattatatgacatagtataatgagacaatatcaaaagtaaacatgtaatgacaatacatactaacattcttgtaggagtggttagagaagctgatgcctcatttctacattctgtcattagctattatcatctaacgtttcagtgtatccttacagaaataaagcagcatatgaataacctgcaaaaaaaaaaaaaaaaaa

SEQ ID NO: 556 - protein, 323 aa, Homo Sapiens
MAEKFDCHYCRDPLQGKKYVQKDGHHCCLKCFDKFCANTCVECRKPIGADSKEVHYKNRFWHDTCFRCAKCLHPLANETFVAKDNKILCNKCTTREDSPKCKGCFKAIVAGDQNVEYKGTVWHKDCFTCSNCKQVIGTGSFFPKGEDFYCVTCHETKFAKHCVKCNKAITSGGITYQDQPWHADCFVCVTCSKKLAGQRFTAVEDQYYCVDCYKNFVAKKCAGCKNPITGKRTVSRVSHPVSKARKPPVCHGKRLPLTLFPSANLRGRHPGGERTCPSWVVVLYRKNRSLAAPRGPGLVKAPVWWPMKDNPGTTTASTAKNAP

SEQ ID NO: 557 - DNA, 6402 bp, Homo Sapiens
tgcgtcatcagggtgcgccactgcagctggcattggccgggactggaagtgcgggcttctgcagcagccgaagctggagctgctaggcagcggctcccctgttgtatggacattctgcacccgaaactgatagctgagtcctgaagttttatgttatgaaacagaagaactttcatcccagcacatgatttgggaattacactttgtgacatggatgaatctgcactgacccttggtacaatagatgtttcttatctgccacattcatcagaatacagtgttggtcgatgtaagcacacaagtgaggaatggggtgagtgtggctttagacccaccatcttcagatctgcaactttaaaatggaaagaaagcctaatgagtcggaaaaggccatttgttggaagatgttgttactcctgcactccccagagctgggacaaatttttcaaccccagtatcccgtctttgggtttgcggaatgttatttatatcaatgaaactcacacaagacaccgcggatggcttgcaagacgcctttcttacgttctttttattcaagagcgagatgtgcataagggcatgtttgccaccaatgtgactgaaaatgtgctgaacagcagtagagtacaagaggcaattgcagaagtggctgctgaattaaaccctgatggttctgcccagcagcaatcaaaagccgttaacaaagtgaaaaagaaagctaaaaggattcttcaagaaatggttgccactgtctcaccggcaatgatcagactgactgggtgggtgctgctaaaactgttcaacagcttcttttggaacattcaaattcacaaaggtcaacttgagatggttaaagctgcaactgagacgaatttgccgcttctgtttctaccagttcatagatcccatattgactatctgctgctcactttcattctcttctgccataacatcaaagcaccatacattgcttcaggcaataatctcaacatcccaatcttcagtaccttgatccataagcttgggggcttcttcatacgacgaaggctcgatgaaacaccagatggacggaaagatgttctctatagagctttgctccatgggcatatagttgaattacttcgacagcagcaattcttggagatcttcctggaaggcacacgttctaggagtggaaaaacctcttgtgctcgggcaggacttttgtcagttgtggtagatactctgtctaccaatgtcatcccagacatcttgataatacctgttggaatctcctatgatcgcattatcgaaggtcactacaatggtgaacaactgggcaaacctaagaagaatgagagcctgtggagtgtagcaagaggtgttattagaatgttacgaaaaaactatggttgtgtccgagtggattttgcacagccattttccttaaaggaatatttagaaagccaaagtcagaaaccggtgtctgctctactttccctggagcaagcgttgttaccagctatacttccttcaagacccagtgatgctgctgatgaaggtagagacacgtccattaatgagtccagaaatgcaacagatgaatccctacgaaggaggttgattgcaaatctggctgagcatattctattcactgctagcaagtcctgtgccattatgtccacacacattgtggcttgcctgctcctctacagacacaggcagggaattgatctctccacattggtcgaagacttctttgtgatgaaagaggaagtcctggctcgtgattttgacctggggttctcaggaaattcagaagatgtagtaatgcatgccatacagctgctgggaaattgtgtcacaatcacccacactagcaggaacgatgagttttttatcacccccagcacaactgtcccatcagtcttcgaactcaacttctacagcaatggggtacttcatgtctttatcatggaggccatcatagcttgcagcctttatgcagttctgaacaagaggggactggggggtcccactagcaccccacctaacctgatcagccaggagcagctggtgcggaaggcggccagcctgtgctaccttctctccaatgaaggcaccatctcactgccttgccagacattttaccaagtctgccatgaaacagtaggaaagtttatccagtatggcattcttacagtggcagagcacgatgaccaggaagatatcagtcctagtcttgctgagcagcagtgggacaagaagcttccagaacctttgtcttggagaagtgatgaagaagatgaagacagtgactttggggaggaacagcgagattgctacctgaaggtgagccaatccaaggagcaccagcagtttatcaccttcttacagagactccttgggcctttgctggaggcctacagctctgctgccatctttgttcacaacttcagtggtcctgttccagaacctgagtatctgcaaaagttgcacaaatacctaataaccagaacagaaagaaatgttgcagtatatgctgagagtgccacatattgtcttgtgaagaatgctgtgaaaatgtttaaggatattggggttttcaaggagaccaaacaaaagagagtgtctgttttagaactgagcagcacttttctacctcaatgcaaccgacaaaaacttctagaatatattctgagttttgtggtgctgtaggtaacgtgtggcactgctggcaaatgaaggtcatgagatgagttccttgtaggtaccagcttctggctcaagagttgaaggtgccatcgcagggtcaggcctgccctgtcccgaagtgatctcctggaagacaagtgccttctccctccatggatctgtgatcttcccagctctgcatcaacacagcagcctgcagataacacttggggggacctcagcctctattcgcaactcataatccgtagactacaagatgaaatctcaataaattatttttgagtttattaaagattgacattttaagtacaacttttaaggactaattactgtgatggacacagaaatgtagctgtgttctggaactgaatcttacatggtatacttagtgctgctgggtaatttgttggtatattatctggttagtggttaatgcttcctttaaaaataattgagtcatccattcactctttttcagttttatctgtcaatagtagctacatttttaatgggagcaccttttatcccaaagtgctttataaattgagtggactgatatatatcacacccaggtatcactgtgctgtcctttgctgtcagatttagaaatgtttttaagagctatgtgaaaacagacaatattagtttaggtcgggaactgagatattgtaatcaaatagttaacatcaggaagttaatttggctggcaaaattctagggaaacttggccagaaaactggtgttgaaggcttttgctcatataaacaagtgccattgagtttcaaatgaccagcaaatatatttagaacccttcctgttttatgtctgtacctcgtccacccctcaggtaatacctgcctctcacaggtacagctgtttcttggaaatcctccaaccaaatagcagttttcctaacttgattagcttgagctgacagactgttagaatacagttctctggccacagctgatgagggctttctgtactgcacacagattgtgtactgcaccccagtccaggtgactggtacccactcgagttgtgccgtgcacaacctgtccagtatatgcatgtggtggccctactgactggtaatggttagaggcatttatggatttttagctttgaggaaaaaccatgacttttaacaaatttttatgggttatatgcctaaacccttatgccacatagtggtaaataattatgaaaaatggtctgttcataattggtaggtgccttttgtgagcagggagcataattattggtttattatggtaattatggtgattttttaaatatcatgtaatgttaaaacgttttctaacagtttactgttgcttatctccaagatattatggaattaagaatttttccagatgagtgttacatagattctttgaatttagtataaaagtactgagaattaagtttgtacttccataagcttggattttaaacactgatagtatctcatgagtaatgtgtgttttgggagagggagggatgctgattgatatttcacattgtatgaaataccatgtttgaaactcatagcaataatgctatgctgttgtgatccctctcaagttctgcatttaaaatatattttttctttataggaattgatgtataccatgaagtcattgtcagttgtagtagctctgatgttgaatgagatatcatgttttagcattccattttactgactagggtagaagaacacttttcttggctacatttggaggatacccagggagtcttgggtgttccttatctggggaagcaaacatttcactagtctctttttttcatcctttaaattgtaaattaaggattactcaagctcaccattattcaagattgggactcgcttcccagtcgacactctgccctgcctgtcattgctgcaaagagctgctgctttgccaacctaagcaaagaaaatacggcttctcttgcattattttcccttttggttggtttgttttctagaagtacgttcagatgctttggggaatgcaatgtatgatttgctagctctctcaccacttaactcactgtgaggataaatatgcatgctttttgtaattaactggtgctttgaaaatcttttttaagggagaaaaatctcaaccaaagttatgctcatccagacaagctgacctttgagttaatttcagcacaactcattcttcagtgcctcatgactgaaaacaaaaaacaaaaaaacgaaagcatcttcacaatgaagcttccagatagcaccgttttgctaaaagatacattctcattgttttccaacagtgatggcttccacataaggttaaacaaactaggtgcttgtaaataatttattacagtttactctatcgcatttctgtaacatgaaatgcatgcccttcttcaggggaagactgtggtcaagttaaaaaaaaaaaacaatattaaacaacatgaaactgcagtctgtttttgaaaatgagaatgtcctaagtgattcagaagagaggagggaagttgtgcactctgaaaatgcatgaaaaacaaaggcaaaaactagtgggaaatgtgtagaactgttaactgagatggcttcgagtcttccttctggaatctgttaaatttcacaaagtcatgagggtaaatggagaaaatatttctgggattacaatgaatgtaagcccaaattgtggaattgccagtaacctggatggggaaaagcatttcccatagcactccatgtaatatgagtgctctgtgagatgttcatcagtgttttatagaaatggtgttgctgggaaaccaagtttgcacctggaaacttacaatgcactttagcgcagtaagggcttggcatccggtagtgaaaaactgtctaacccagcattgcccaaactattttgacaccaggacctttttctcctttgggatacttatgaacctctcactaatgtcctgtggagaacattttgggaaacactatgttagatagttctttaaggagacaaaacggtaatgaacagatagcactggggcagaatatgcatgcattttgtaacgtccagtgtggcgttgaatagatgtgtatttcctcccctgcagaaaataagcacagaaaattataatgtaggtgatcggagctctttcctttgatagagagaacagccccaatgatcctggctttttcactgaacgtatcagaatacatggatgaattggggtaaataaggttttaattcagatctagaagaaagtattgtacgtttgaatgcagatttttatccacagatagttgtagtgtttagacatgacaggacctatcgttgaggtttctaagacttactatgggctgtaaacctgttttttaaaactattttagaaacctgagacttgccgtctggcattttagtttaatacaaactaatgattgcatttgaaagagattcttgaccttatttctaaacgtctagagctctgaaatgtcttgatggaaggtattaaactatttgcctgttgtacaaagaaatgttaagactcgtgaaaagaattactataaggtactgtgaaataactgcgattttgtgagcaaaacatacttggaaatgctgattgatttttatgcttgttagtgtattgcaagaaacacagaaaatgtagttttgttttaataaaccaaaaattgaacatacaaaaaaaaaaaaaaaaaaa

SEQ ID NO: 558 - protein, 828 aa, Homo Sapiens
MDESALTLGTIDVSYLPHSSEYSVGRCKHTSEEWGECGFRPTIFRSATLKWKESLMSRKRPFVGRCCYSCTPQSWDKFFNPSIPSLGLRNVIYINETHTRHRGWLARRLSYVLFIQERDVHKGMFATNVTENVLNSSRVQEAIAEVAAELNPDGSAQQQSKAVNKVKKKAKRILQEMVATVSPAMIRLTGWVLLKLFNSFFWNIQIHKGQLEMVKAATETNLPLLFLPVHRSHIDYLLLTFILFCHNIKAPYIASGNNLNIPIFSTLIHKLGGFFIRRRLDETPDGRKDVLYRALLHGHIVELLRQQQFLEIFLEGTRSRSGKTSCARAGLLSVVVDTLSTNVIPDILIIPVGISYDRIIEGHYNGEQLGKPKKNESLWSVARGVIRMLRKNYGCVRVDFAQPFSLKEYLESQSQKPVSALLSLEQALLPAILPSRPSDAADEGRDTSINESRNATDESLRRRLIANLAEHILFTASKSCAIMSTHIVACLLLYRHRQGIDLSTLVEDFFVMKEEVLARDFDLGFSGNSEDVVMHAIQLLGNCVTITHTSRNDEFFITPSTTVPSVFELNFYSNGVLHVFIMEAIIACSLYAVLNKRGLGGPTSTPPNLISQEQLVRKAASLCYLLSNEGTISLPCQTFYQVCHETVGKFIQYGILTVAEHDDQEDISPSLAEQQWDKKLPEPLSWRSDEEDEDSDFGEEQRDCYLKVSQSKEHQQFITFLQRLLGPLLEAYSSAAIFVHNFSGPVPEPEYLQKLHKYLITRTERNVAVYAESATYCLVKNAVKMFKDIGVFKETKQKRVSVLELSSTFLPQCNRQKLLEYILSFVVL

SEQ ID NO: 559 - DNA, 3126 bp, Homo Sapiens
cgagctgctgcccgcaggaggcaggacgcgcaggggtgggaccggcgccccagcccgtctcccggccccgggcgcgcgggaaccccgggtcctgcagcctcccgagtgcggagaggcggggccgcccgctgccgcccggctgcctgcgccccctcccgcggccccggctctgggagcggggcgccccgcgcgcgggcacacggcggccagagcgccgaggcggtaccttcagcctgcaatgagaggaacccgggagagcccccgggagccagcgaagagcttggctgctgcgtccagggctgctgctgccgccgcggctgcttgaaactcctcaaagttgagagccggctagagggtgccgcccgccgggagccggagggaaaggaagtcggaaggtgcaagagtgacagacacggacagacggacgcgcagaccttcggaaggcactgcgtaggcagcctccccggagcccacgaggctccccagcaccgactaacccaggaaagaggaaaaaatacatttaacagtgaagaggcaacacagagctccctattgtgaaataaaacccatttcaaaagttattggaaagaaagttcactggtgggaggctgagccggtggaaaagacaccgggaagagactcagaggcgaccataatgtcgttacgtgtacacactctgcccaccctgcttggagccgtcgtcagaccgggctgcagggagctgctgtgtttgctgatgatcacagtgactgtgggccctggtgcctctggggtgtgccccaccgcttgcatctgtgccactgacatcgtcagctgcaccaacaaaaacctgtccaaggtgcctgggaaccttttcagactgattaagagactggacctgagttataacagaattgggcttctggattctgagtggattccagtatcgtttgcaaagctgaacaccctaattcttcgtcataacaacatcaccagcatttccacgggcagtttttccacaactccaaatttgaagtgtcttgacttatcgtccaataagctgaagacggtgaaaaatgctgtattccaagagttgaaggttctggaagtgcttctgctttacaacaatcacatatcctatctcgatccttcagcgtttggagggctctcccagttgcagaaactctacttaagtggaaattttctcacacagtttccgatggatttgtatgttggaaggttcaagctggcagaactgatgtttttagatgtttcttataaccgaattccttccatgccaatgcaccacataaatttagtgccaggaaaacagctgagaggcatctaccttcatggaaacccatttgtctgtgactgttccctgtactccttgctggtcttttggtatcgtaggcactttagctcagtgatggattttaagaacgattacacctgtcgcctgtggtctgactccaggcactcgcgtcaggtacttctgctccaggatagctttatgaattgctctgacagcatcatcaatggttcctttcgtgcgcttggctttattcatgaggctcaggtcggggaaagactgatggtccactgtgacagcaagacaggtaatgcaaatacggatttcatctgggtgggtccagataacagactgctagagccggataaagagatggaaaacttttacgtgtttcacaatggaagtctggttatagaaagccctcgttttgaggatgctggagtgtattcttgtatcgcaatgaataagcaacgcctgttaaatgaaactgtggacgtcacaataaatgtgagcaatttcactgtaagcagatcccatgctcatgaggcatttaacacagcttttaccactcttgctgcttgcgtggccagtatcgttttggtacttttgtacctctatctgactccatgcccctgcaagtgtaaaaccaagagacagaaaaatatgctacaccaaagcaatgcccattcatcgattctcagtcctggccccgctagtgatgcctccgctgatgaacggaaggcaggtgcaggtaaaagagtggtgtttttggaacccctgaaggatactgcagcagggcagaacgggaaagtcaggctctttcccagcgaggcagtgatagctgagggcatcctaaagtccacgagggggaaatctgactcagattcagtcaattcagtgttttctgacacaccttttgtggcgtccacttaatttgtgcctatatttgtatgatgtcataatttaatctgttcatatttaactttgtgtgtggtctgcaaaataaacagcaggacagaaattgtgttgttttgttctttgaaatacaaccaaattctcttaaaatgattggtaggaaatgaggtaaagtacttcagttcctcaatgtgccatagaaagatggggttgttttccaaagtttaagttctagatcacaatatcttagcttttagcactattggtaatttcagagtaggcccaaaggtgatatgactcccattgtccctttatttaggatattgaaagaaaaaataaactttatgtattagtgtcctttaaaaatagactttgctaacttactagtaccagagttattttaaagaaaaacactagtgtccaatttcatttttaaaagatgtagaaagaagaatcaagcatcaattaattataaagcctaaagcaaagttagatttgggggttattcagccaaaattaccgttttagaccagaatgaatagactacactgataaaatgtactggataatgccacatcctatatggtgttatagaaatagtgcaaggaaagtacatttgtttgcctgtcttttcattttgtacattcttcccattctgtattcttgtacaaaagatctcattgaaaatttaaagtcatcataatttgttgccataaatatgtaagtgtcaataccaaaatgtctgagtaacttcttaaatccctgttctagcaaactaatattggttcatgtgcttgtgtatatgtaaatcttaaattatgtgaactattaaatagaccctactgtactgtgaaaaaaaaaaaaaaaaaaaaaaaaaaaaaaaaaaaaaaaaaaaaaaaaaaaaaaaaaaaaaaaaaaaa

SEQ ID NO: 560 - protein, 522 aa, Homo Sapiens
MSLRVHTLPTLLGAVVRPGCRELLCLLMITVTVGPGASGVCPTACICATDIVSCTNKNLSKVPGNLFRLIKRLDLSYNRIGLLDSEWIPVSFAKLNTLILRHNNITSISTGSFSTTPNLKCLDLSSNKLKTVKNAVFQELKVLEVLLLYNNHISYLDPSAFGGLSQLQKLYLSGNFLTQFPMDLYVGRFKLAELMFLDVSYNRIPSMPMHHINLVPGKQLRGIYLHGNPFVCDCSLYSLLVFWYRRHFSSVMDFKNDYTCRLWSDSRHSRQVLLLQDSFMNCSDSIINGSFRALGFIHEAQVGERLMVHCDSKTGNANTDFIWVGPDNRLLEPDKEMENFYVFHNGSLVIESPRFEDAGVYSCIAMNKQRLLNETVDVTINVSNFTVSRSHAHEAFNTAFTTLAACVASIVLVLLYLYLTPCPCKCKTKRQKNMLHQSNAHSSILSPGPASDASADERKAGAGKRVVFLEPLKDTAAGQNGKVRLFPSEAVIAEGILKSTRGKSDSDSVNSVFSDTPFVAST

SEQ ID NO: 561 - DNA, 1633 bp, Homo Sapiens
attgtggtgccttgtagctgtcccgggagccctcagcagcagttggagctggtgcacaggaaggatgaggaagaccaggctctgggggctgctgtggatgctctttgtctcagaactccgagctgcaactaaattaactgaggaaaagtatgaactgaaagaggggcagaccctggatgtgaaatgtgactacacgctagagaagtttgccagcagccagaaagcttggcagataataagggacggagagatgcccaagaccctggcatgcacagagaggccttcaaagaattcccatccagtccaagtggggaggatcatactagaagactaccatgatcatggtttactgcgcgtccgaatggtcaaccttcaagtggaagattctggactgtatcagtgtgtgatctaccagcctcccaaggagcctcacatgctgttcgatcgcatccgcttggtggtgaccaagggtttttcagggacccctggctccaatgagaattctacccagaatgtgtataagattcctcctaccaccactaaggccttgtgcccactctataccagccccagaactgtgacccaagctccacccaagtcaactgccgatgtctccactcctgactctgaaatcaaccttacaaatgtgacagatatcatcagggttccggtgttcaacattgtcattctcctggctggtggattcctgagtaagagcctggtcttctctgtcctgtttgctgtcacgctgaggtcatttgtaccctaggcccacgaacccacgagaatgtcctctgacttccagccacatccatctggcagttgtgccaagggaggagggaggaggtaaaaggcagggagttaataacatgaattaaatctgtaatcaccggctatttctaaagtcagcgtctcaccttcctgcccactgccctcgttcctctaataatcttgggtgggcatttgtgcctcagaaaagaagttacagccccaaacatgcttggtccttcattccaccagccacttggggttggcatgaaatacagacagctcaatgcttttcaccgtaattctcttgtgggggctgtgacatgcagaaggcacacctgatacttctcctgctcagttttgccctggaccatacaattttggcctgacctggacagagctcccactacagaagcatcctgctcgccccatgctgggacttcctctttctagcatcagacacttgggtttcatgcttatgtgtggttctttccaacactcccagaaaagggtgttgaagattgtggaacctggagaaataagacatcgtggtgagaaagtgcatccttctcagagaaaagagttaaactgagtatcttcttctggggaaatactggcaggccgagatgggatccataggagagcaacaacagaccatgtcagacatcctgtgtgcatttatcgctggatcctgaaaatagccccgtgaaggcagaaatgtatgtgactagaacgaggccacatgaataagccactgcccactggcaggagtgaaaactgaagcgctccttacctgaaggaccccaaaaccatatagaatagaataaccaggagttccgcctgtgtctaaatgcctcttttcctg

SEQ ID NO: 562 - protein, 234 aa, Homo Sapiens
MRKTRLWGLLWMLFVSELRAATKLTEEKYELKEGQTLDVKCDYTLEKFASSQKAWQIIRDGEMPKTLACTERPSKNSHPVQVGRIILEDYHDHGLLRVRMVNLQVEDSGLYQCVIYQPPKEPHMLFDRIRLVVTKGFSGTPGSNENSTQNVYKIPPTTTKALCPLYTSPRTVTQAPPKSTADVSTPDSEINLTNVTDIIRVPVFNIVILLAGGFLSKSLVFSVLFAVTLRSFVP

SEQ ID NO: 563 - DNA, 1524 bp, Homo Sapiens
aacagttgccttttcctctcacagaaggaagatttcattttgtttgagacgagaaaccaaaccacacaccaaagagaggggtatgatggctaagaagcccccaaaaccagcccctcgcaggatcttccaggaaaggttaaagattactgctctacctttgtactttgaaggttttttattaatcaagcggtcaggataccgggagtatgagcattactggacagagttgagaggaactactcttttcttttataccgacaaaaagagtataatatatgttgacaaattagacatagtagacctcacatgccttactgagcagaattcaactgaaaagaactgtgcgaaattcacccttgttttgccgaaagaggaagtacaactgaagacagagaacacagaaagtggggaagaatggagaggcttcattcttacagtaacagagctgtcagttccccaaaacgtgtcactcctacctgggcaagtaattaaactgcatgaagtcctagagagagaaaagaaaaggaggattgagacagagcagagtacgtccgtggaaaaagagaaggaaccaactgaagattatgtggatgtactgaaccctatgccagcatgtttttatacagtgtcccggaaagaggcaactgagatgctccagaagaacccttctttgggaaatatgatcctgaggcctggtagtgacagtagaaactactccatcactattcggcaggagatagacattccaagaatcaagcactacaaagtgatgagcgtaggacaaaactacactattgaactggaaaaacctgtaacactcccaaaccttttcagtgtcattgattattttgtgaaggagactcgaggaaatttaagaccatttatatgttcaactgatgaaaacactggtcaagaacccagtatggaagggagaagtgaaaagttgaagaaaaatccacacattgcatgaaatacaatgtgaaagctcctttgtatatcttggtaatttatattttcaaaacgaagttcttacttttaaagagaattacctatattctcctgatactgattaccaagtcattcacctgaacaccagaattagaattaaacattgtaccatacaatttcattatcttatcagaatgaaaccaattcacagggaaactagagactacggctgtggtggtaacctgcagatatacacattcccatgcactgacataagttgaaaacacatagtactttctagatggaatttttttctttaggcctcaatgaaatacatttcccctatataattccaacagcagtttctctagttctaaattttaccaattcccaaaaaacctaagttttgctgaaatctgatttgaccaatttatcaaatatgtcattttaattacctagctggaagttagagacatgaaatgtactagaggagcccttttccaatggaaatattatataccacattttttgttaatggaaataaatgtcttcattcccatgttaaaaaaaaaaaaa

SEQ ID NO: 564 - protein, 295 aa, Homo Sapiens
MMAKKPPKPAPRRIFQERLKITALPLYFEGFLLIKRSGYREYEHYWTELRGTTLFFYTDKKSIIYVDKLDIVDLTCLTEQNSTEKNCAKFTLVLPKEEVQLKTENTESGEEWRGFILTVTELSVPQNVSLLPGQVIKLHEVLEREKKRRIETEQSTSVEKEKEPTEDYVDVLNPMPACFYTVSRKEATEMLQKNPSLGNMILRPGSDSRNYSITIRQEIDIPRIKHYKVMSVGQNYTIELEKPVTLPNLFSVIDYFVKETRGNLRPFICSTDENTGQEPSMEGRSEKLKKNPHIA

SEQ ID NO: 565 - DNA, 3142 bp, Homo Sapiens
agacactgaatcatcatttgtagtttggggggctttacatgcctgcagtggtgaaaactgaaattttgtcccacttaagggagtttcttcttccctttattaattgcaaaataaatatatgtcacttcagagggcagcagctggactacctatgtttgtggcgctacaccaacctgaacttcgcttcctgagacctaagattcagccccgtgctcagcagacatcagggatcaccgactctgtgccaggagctgttcttgatgctgggaacgcaggggtggacaaaacagagaaagccctgccctcagaatgccagcagttactctgcagagatgacggagcccaagtcggtgtgtgtctcggtggatgaggtggtgtccagcaacatggaggccactgagacggacctgctgaatggacatctgaaaaaagtagataataacctcacggaagcccagcgcttctcctccttgcctcggagggcagctgtgaacattgaattcagggacctttcctattcggttcctgaaggaccctggtggaggaagaaaggatacaagaccctcctgaaaggaatttccgggaagttcaatagtggtgagttggtggccattatgggtccttccggggccgggaagtccacgctgatgaacatcctggctggatacagggagacgggcatgaagggggccgtcctcatcaacggcctgccccgggacctgcgctgcttccggaaggtgtcctgctacatcatgcaggatgacatgctgctgccgcatctcactgtgcaggaggccatgatggtgtcggcacatctgaagcttcaggagaaggatgaaggcagaagggaaatggtcaaggagatactgacagcgctgggcttgctgtcttgcgccaacacgcggaccgggagcctgtcaggtggtcagcgcaagcgcctggccatcgcgctggagctggtgaacaaccctccagtcatgttcttcgatgagcccaccagcggcctggacagcgcctcctgcttccaggtggtctcgctgatgaaagggctcgctcaagggggtcgctccatcatttgcaccatccaccagcccagcgccaaactcttcgagctgttcgaccagctttacgtcctgagtcaaggacaatgtgtgtaccggggaaaagtctgcaatcttgtgccatatttgagggatttgggtctgaactgcccaacctaccacaacccagcagattttgtcatggaggttgcatccggcgagtacggtgatcagaacagtcggctggtgagagcggttcgggagggcatgtgtgactcagaccacaagagagacctcgggggtgatgccgaggtgaacccttttctttggcaccggccctctgaagaggactcctcgtccatggaaggctgccacagcttctctgccagctgcctcacgcagttctgcatcctcttcaagaggaccttcctcagcatcatgagggactcggtcctgacacacctgcgcatcacctcgcacattgggatcggcctcctcattggcctgctgtacttggggatcgggaacgaagccaagaaggtcttgagcaactccggcttcctcttcttctccatgctgttcctcatgttcgcggccctcatgcctactgttctgacatttcccctggagatgggagtctttcttcgggaacacctgaactactggtacagcctgaaggcctactacctggccaagaccatggcagacgtgccctttcagatcatgttcccagtggcctactgcagcatcgtgtactggatgacgtcgcagccgtccgacgccgtgcgctttgtgctgtttgccgcgctgggcaccatgacctccctggtggcacagtccctgggcctgctgatcggagccgcctccacgtccctgcaggtggccactttcgtgggcccagtgacagccatcccggtgctcctgttctcggggttcttcgtcagcttcgacaccatccccacgtacctacagtggatgtcctacatctcctatgtcaggtatgggttcgaaggggtcatcctctccatctatggcttagaccgggaagatctgcactgtgacatcgacgagacgtgccacttccagaagtcggaggccatcctgcgggagctggacgtggaaaatgccaagctgtacctggacttcatcgtactcgggattttcttcatctccctccgcctcattgcctattttgtcctcaggtacaaaatccgggcagagaggtaaaacacctgaatgccaggaaacaggaagattagacactgtggccgagggcacgtctagaatcgaggaggcaagcctgtgcccgaccgacgacacagagactcttctgatccaacccctagaaccgcgttgggtttgtgggtgtctcgtgctcagccactctgcccagctgggttggatcttctctccattcccctttctagctttaactaggaagatgtaggcagattggtggtttttttttttttaacatacagaattttaaataccacaactggggcagaatttaaagctgcaacacagctggtgatgagaggcttcctcagtccagtcgctccttagcaccaggcaccgtgggtcctggatggggaactgcaagcagcctctcagctgatggctgcacagtcagatgtctggtggcagagagtccgagcatggagcgattccattttatgactgttgtttttcacattttcatctttctaaggtgtgtctcttttccaatgagaagtcatttttgcaagccaaaagtcgatcaatcgcattcattttaagaaattatacctttttagtacttgctgaagaatgattcagggtaaatcacatactttgtttagagaggcgaggggtttaaccgagtcacccagctggtctcatacatagacagcacttgtgaaggattgaatgcaggttccaggtggagggaagacgtggacaccatctccactgagccatgcagacatttttaaaagctatacaaaaaattgtgagaagacattggccaactctttcaaagtctttctttttccacgtgcttcttattttaagcgaaatatattgtttgtttcttcctaaaaaaaaaaaaaaaaaaaaaaaaa

SEQ ID NO: 566 - protein, 668 aa, Homo Sapiens
MLGTQGWTKQRKPCPQNASSYSAEMTEPKSVCVSVDEVVSSNMEATETDLLNGHLKKVDNNLTEAQRFSSLPRRAAVNIEFRDLSYSVPEGPWWRKKGYKTLLKGISGKFNSGELVAIMGPSGAGKSTLMNILAGYRETGMKGAVLINGLPRDLRCFRKVSCYIMQDDMLLPHLTVQEAMMVSAHLKLQEKDEGRREMVKEILTALGLLSCANTRTGSLSGGQRKRLAIALELVNNPPVMFFDEPTSGLDSASCFQVVSLMKGLAQGGRSIICTIHQPSAKLFELFDQLYVLSQGQCVYRGKVCNLVPYLRDLGLNCPTYHNPADFVMEVASGEYGDQNSRLVRAVREGMCDSDHKRDLGGDAEVNPFLWHRPSEEDSSSMEGCHSFSASCLTQFCILFKRTFLSIMRDSVLTHLRITSHIGIGLLIGLLYLGIGNEAKKVLSNSGFLFFSMLFLMFAALMPTVLTFPLEMGVFLREHLNYWYSLKAYYLAKTMADVPFQIMFPVAYCSIVYWMTSQPSDAVRFVLFAALGTMTSLVAQSLGLLIGAASTSLQVATFVGPVTAIPVLLFSGFFVSFDTIPTYLQWMSYISYVRYGFEGVILSIYGLDREDLHCDIDETCHFQKSEAILRELDVENAKLYLDFIVLGIFFISLRLIAYFVLRYKIRAER

SEQ ID NO: 567 - DNA, 4573 bp, Homo Sapiens
gcccgagaagctggggagcatggaccagaccccgcagcgctggcaccatgacgctcgcccgcttcgtgctagccctgatgttaggggcgctccccgaagtggtcggctttgattctgtcctcaatgattccctccaccacagccaccgccattcgccccctgcgggtccgcactacccctattaccttcccacccagcagcggcccccgaggacgcgtccgccgccgcctctcccgcgcttcccgcgccccccgcgggcgctccctgcccagcgcccgcacgccctccaggccgggcacacgccccggccgcacccctggggctgccccgccggcgagccatgggtcagcgtgacggacttcggcgccccgtgtctgcggtgggcggaggtgccacccttcctggagcggtcgcccccagcgagctgggctcagctgcgaggacagcgccacaacttttgtcggagccccgacggcgcgggcagaccctggtgtttctacggagacgcccgtggcaaggtggactggggctactgcgactgcagacacggatcagtacgacttcgtggcggcaaaaatgagtttgaaggcacagtggaagtatatgcaagtggagtttggggcactgtctgtagcagccactgggatgattctgatgcatcagtcatttgtcaccagctgcagctgggaggaaaaggaatagcaaaacaaaccccgttttctggactgggccttattcccatttattggagcaatgtccgttgccgaggagatgaagaaaatatactgctttgtgaaaaagacatctggcagggtggggtgtgtcctcagaagatggcagctgctgtcacgtgtagcttttcccatggcccaacgttccccatcattcgccttgctggaggcagcagtgtgcatgaaggccgggtggagctctaccatgctggccagtggggaaccgtttgtgatgaccaatgggatgatgccgatgcagaagtgatctgcaggcagctgggcctcagtggcattgccaaagcatggcatcaggcatattttggggaagggtctggcccagttatgttggatgaagtacgctgcactgggaatgagctttcaattgagcagtgtccaaagagctcctggggagagcataactgtggccataaagaagatgctggagtgtcctgtacccctctaacagatggggtcatcagacttgcaggtgggaaaggcagccatgagggtcgcttggaggtatattacagaggccagtggggaactgtctgtgatgatggctggactgagctgaatacatacgtggtttgtcgacaattgggatttaaatatggtaaacaagcatctgccaaccattttgaagaaagcacagggcccatatggttggatgacgtcagctgctcaggaaaggaaaccagatttcttcagtgttccaggcgacagtggggaaggcatgactgcagccaccgcgaagatgttagcattgcctgctaccctggcggcgagggacacaggctctctctgggttttcctgtcagactgatggatggagaaaataagaaagaaggacgagtggaggtttttatcaatggccagtggggaacaatctgtgatgatggatggactgataaggatgcagctgtgatctgtcgtcagcttggctacaagggtcctgccagagcaagaaccatggcttactttggagaaggaaaaggacccatccatgtggataatgtgaagtgcacaggaaatgagaggtccttggctgactgtatcaagcaagatattggaagacacaactgccgccacagtgaagatgcaggagttatttgtgattattttggcaagaaggcctcaggtaacagtaataaagagtccctctcatctgtttgtggcttgagattactgcaccgtcggcagaagcggatcattggtgggaaaaattctttaaggggtggttggccttggcaggtttccctccggctgaagtcatcccatggagatggcaggctcctctgcggggctacgctcctgagtagctgctgggtcctcacagcagcacactgtttcaagaggtatggcaacagcactaggagctatgctgttagggttggagattatcatactctggtaccagaggagtttgaggaagaaattggagttcaacagattgtgattcatcgggagtatcgacccgaccgcagtgattatgacatagccctggttagattacaaggaccagaagagcaatgtgccagattcagcagccatgttttgccagcctgtttaccactctggagagagaggccacagaaaacagcatccaactgttacataacaggatggggtgacacaggacgagcctattcaagaacactacaacaagcagccattcccttacttcctaaaaggttttgtgaagaacgttataagggtcggtttacagggagaatgctttgtgctggaaacctccatgaacacaaacgcgtggacagctgccagggagacagcggaggaccactcatgtgtgaacggcccggagagagctgggtggtgtatggggtgacctcctgggggtatggctgtggagtcaaggattctcctggtgtttataccaaagtctcagcctttgtaccttggataaaaagtgtcaccaaactgtaattcttcatggaaacttcaaagcagcatttaaacaaatggaaaactttgaacccccactattagcactcagcagagatgacaacaaatggcaagatctgtttttgctttgtgttgtggtaaaaaattgtgtaccccctgctgcttttgagaaatttgtgaacattttcagaggcctcagtgtagtggaagtgataatccttaaatgaacattttctaccctaatttcactggagtgacttattctaagcctcatctatcccctacctatttctcaaaatcattctatgctgattttacaaaagatcatttttacatttgaactgagaaccccttttaattgaatcagtggtgtctgaaatcatattaaatacccacatttgacataaatgcggtaccctttactacactcatgagtggcatatttatgcttaggtcttttcaaaagacttgacaagaaatcttcatattctctgtagcctttgtcaagtgaggaaatcagtggttaaagaattccactataaacttttaggcctgaataggagtagtaaagcctcaaggacatctgcctgtcacaatatattctcaaagtgatctgatatttggaaacaagtatccttgttgagtaccaagtgctacagaaaccataagataaaaatactttctacctacagcgtataaactagcaaaatttgaaaggatttctggtaactaaatgccagctggacatacaacctattttatccaacacattaacatatctactatatttgcttttaacaagcacctcatcatagtccacgttccccgaccatgatgtaagagtgccacccactgacacttccctgtaactgacttatacctgcaggttttcccaagcccaacctgatacaatccaatcttaaaatatactagtcaaaatgctttcctggcctacacattgaaaagttctaatacatacagcagttataacatatgccaggcactgcattaggcagctttgcacatcactgacaatttgcaaaaggccagtaaatcttatggtagtagcccttgttttcaaatgggggaaaacaggcttgcctcaaagtgagaccagttggtgaaactgattccaaactccagaaaaaatgctgatttttttccccatggttctcctacctaaatgattggtttccctatggctatttctccaagagttaagggatagctgcttaactatgcacctttacagaacattcttagcagtaatgctcaaatttaaaaggcacactcaagatacttccatgtcatggatccttccccaggtcccagtagtataaatatagggaagaggttagcatgaacttacaaattgttttaagtaatcctcttgaatgccagtcattaaaggactttgcccttctacatcaaattacatccttttcacaaatccccatttctgtaataactggtgcaaacctaaaggtgctttatagttttactactttgcagatttgcaatgctgcatataatgcagaagagcattaaaaacttttgtaaaaactcatgattttgataaacttttaaagtagcgtttatatgtaaatagaactacacatggcacacacacttgcacaagggcttcagaaaaacgtgcaatataggtgagaaaaatgtctattgaaactttctcacaggctgcccttataattaaactagtgttggggcaagcaacatctgtttcaagtagatcagggactagcaaacctaaaaggcagcaagcagcctgcagtttgctcaatccttaagaatacatggttcatacaacatgcttttactatgtcttaagtgtgacttttgaaagatacaagtgttctgtgcatatttgtgtaaataaatacataattttccaccttgta

SEQ ID NO: 568 - protein, 875 aa, Homo Sapiens
MTLARFVLALMLGALPEVVGFDSVLNDSLHHSHRHSPPAGPHYPYYLPTQQRPPRTRPPPPLPRFPRPPRALPAQRPHALQAGHTPRPHPWGCPAGEPWVSVTDFGAPCLRWAEVPPFLERSPPASWAQLRGQRHNFCRSPDGAGRPWCFYGDARGKVDWGYCDCRHGSVRLRGGKNEFEGTVEVYASGVWGTVCSSHWDDSDASVICHQLQLGGKGIAKQTPFSGLGLIPIYWSNVRCRGDEENILLCEKDIWQGGVCPQKMAAAVTCSFSHGPTFPIIRLAGGSSVHEGRVELYHAGQWGTVCDDQWDDADAEVICRQLGLSGIAKAWHQAYFGEGSGPVMLDEVRCTGNELSIEQCPKSSWGEHNCGHKEDAGVSCTPLTDGVIRLAGGKGSHEGRLEVYYRGQWGTVCDDGWTELNTYVVCRQLGFKYGKQASANHFEESTGPIWLDDVSCSGKETRFLQCSRRQWGRHDCSHREDVSIACYPGGEGHRLSLGFPVRLMDGENKKEGRVEVFINGQWGTICDDGWTDKDAAVICRQLGYKGPARARTMAYFGEGKGPIHVDNVKCTGNERSLADCIKQDIGRHNCRHSEDAGVICDYFGKKASGNSNKESLSSVCGLRLLHRRQKRIIGGKNSLRGGWPWQVSLRLKSSHGDGRLLCGATLLSSCWVLTAAHCFKRYGNSTRSYAVRVGDYHTLVPEEFEEEIGVQQIVIHREYRPDRSDYDIALVRLQGPEEQCARFSSHVLPACLPLWRERPQKTASNCYITGWGDTGRAYSRTLQQAAIPLLPKRFCEERYKGRFTGRMLCAGNLHEHKRVDSCQGDSGGPLMCERPGESWVVYGVTSWGYGCGVKDSPGVYTKVSAFVPWIKSVTKL

SEQ ID NO: 569 - DNA, 2152 bp, Homo Sapiens
ttcgtagtttcctgataaccattcagtcatctatttcaacaccctgacatgacataaaggcaggcacggaaccacacgttcaccatacagacacacgccactttgctggagcattcactaggcgaggcgctccatcggactcactagctgcactcatgaatcggcaccatctgcaggatcactttctggaaatagacaagaagaactgctgtgtgttccgagatgacttcattgccaaggtgttgccgccggtgttggggctggagtttatctttgggcttctgggcaatggccttgccctgtggattttctgtttccacctcaagtcctggaaatccagccggattttcctgttcaacctggcagtagctgactttctactgatcatctgcctgccgttcgtgatggactactatgtgcggcgttcagactggaagtttggggacatcccttgccggctggtgctcttcatgtttgccatgaaccgccagggcagcatcatattcctcacggtggtggcggtagacaggtatttccgggtggtccatccccaccacgccctgaacaagatctccaattggacagcagccatcatctcttgccttctgtggggcatcactgttggcctaacagtccacctcctgaagaagaagttgctgatccagaatggcactgcaaatgtgtgcatcagcttcagcatctgccataccttccggtggcacgaagctatgttcctcctggagttcttcctgcccctgggcatcatcctgttctgctcagccagaattatctggagcctgcggcagagacaaatggaccggcatgccaagatcaagagagccatcaccttcatcatggtggtggccatcgtctttgtcatctgcttccttcccagcgtggttgtgcggatccacatcttctggctcctgcacacttcgggcacgcagaattgtgaagtgtaccgctcggtggacctggcgttctttatcactctcagcttcacctacatgaacagcatgctggaccccgtggtgtactacttctccagcccatcctttcccaacttcttctccactttgatcaaccgctgcctccagaggaagataacaggtgagccagataataaccgcagcacgagcgtcgagctcacaggggaccccaacaaaaccagaggcgctccagaggcgttaatcgccaactccggtgagccatggagcccctcttatctgggcccaacctcaaataaccattccaagaagggacattgtcaccaagaaccagcatctctggagaaacagttgggctgttgcatcgagtaatgtcactggactcggcctaagatttcctggaacttccagattcagagaatctgatttagggaaactgtggcagatgagtgggagactggttgcaaggtgtgaccgcaggaatcctggaggaacagagagtaaagcttctaggcatctgaaacttgcttcatctctgacgctcgcaggactgaagatgggcaaattgtaggcgtttctgctgagcagagttggagccagagatctacttgtgacttgttggccttcttcccacatctgcctcagactggagggggctcagctcctggggtgatatctagcctgcttgtgagctctagcagggataaggagagctgagattggagggaattgtgttgttcctggaggaagcccaggcatcattaaacaagccagtaggtcacctggcttccgtggaccaattcatctttcagacaatctttagcagaaatggactcagggaagagactcacatgctttggttagtatctgtgtttccggtgggtgtaataggggattagccccagaagggactgagctaaacagtgttattatgggaaaggaaatggcattgctgctttcaaccagcgactaatgcaatccattcctctcttgtttatagtaatctaagggttgaacagttaaaacggcttcaggatagaaagctgtttcccacctgtttgcttttaccattaaaagggaaacgtgcctctgccccacgggtagaggggtgcacgttcctcctggttccttcgcttgtgtttctgtacttaccaaaaatctaccatttcaataaattttgataggagacaaaaaaaaaaaaaaaa

SEQ ID NO: 570 - protein, 387 aa, Homo Sapiens
MNRHHLQDHFLEIDKKNCCVFRDDFIAKVLPPVLGLEFIFGLLGNGLALWIFCFHLKSWKSSRIFLFNLAVADFLLIICLPFVMDYYVRRSDWKFGDIPCRLVLFMFAMNRQGSIIFLTVVAVDRYFRVVHPHHALNKISNWTAAIISCLLWGITVGLTVHLLKKKLLIQNGTANVCISFSICHTFRWHEAMFLLEFFLPLGIILFCSARIIWSLRQRQMDRHAKIKRAITFIMVVAIVFVICFLPSVVVRIHIFWLLHTSGTQNCEVYRSVDLAFFITLSFTYMNSMLDPVVYYFSSPSFPNFFSTLINRCLQRKITGEPDNNRSTSVELTGDPNKTRGAPEALIANSGEPWSPSYLGPTSNNHSKKGHCHQEPASLEKQLGCCIE

SEQ ID NO: 571 - DNA, 1892 bp, Homo Sapiens
ggcgcccgcgcccgcccccgcgccgggcccggctcggcccgacccggctccgccgcgggcaggcggggcccagcgcactcggagcccgagcccgagccgcagccgccgcctggggcgcttgggtcggcctcgaggacaccggagaggggcgccacgccgccgtggccgcagatttgaaagaagccaacactaaaccacaaatatacaacaaggccattttctcaaacgagagtcagcctttaacgaaatgaccatggttgacacagagatgccattctggcccaccaactttgggatcagctccgtggatctctccgtaatggaagaccactcccactcctttgatatcaagcccttcactactgttgacttctccagcatttctactccacattacgaagacattccattcacaagaacagatccagtggttgcagattacaagtatgacctgaaacttcaagagtaccaaagtgcaatcaaagtggagcctgcatctccaccttattattctgagaagactcagctctacaataagcctcatgaagagccttccaactccctcatggcaattgaatgtcgtgtctgtggagataaagcttctggatttcactatggagttcatgcttgtgaaggatgcaagggtttcttccggagaacaatcagattgaagcttatctatgacagatgtgatcttaactgtcggatccacaaaaaaagtagaaataaatgtcagtactgtcggtttcagaaatgccttgcagtggggatgtctcataatgccatcaggtttgggcggatgccacaggccgagaaggagaagctgttggcggagatctccagtgatatcgaccagctgaatccagagtccgctgacctccgggccctggcaaaacatttgtatgactcatacataaagtccttcccgctgaccaaagcaaaggcgagggcgatcttgacaggaaagacaacagacaaatcaccattcgttatctatgacatgaattccttaatgatgggagaagataaaatcaagttcaaacacatcacccccctgcaggagcagagcaaagaggtggccatccgcatctttcagggctgccagtttcgctccgtggaggctgtgcaggagatcacagagtatgccaaaagcattcctggttttgtaaatcttgacttgaacgaccaagtaactctcctcaaatatggagtccacgagatcatttacacaatgctggcctccttgatgaataaagatggggttctcatatccgagggccaaggcttcatgacaagggagtttctaaagagcctgcgaaagccttttggtgactttatggagcccaagtttgagtttgctgtgaagttcaatgcactggaattagatgacagcgacttggcaatatttattgctgtcattattctcagtggagaccgcccaggtttgctgaatgtgaagcccattgaagacattcaagacaacctgctacaagccctggagctccagctgaagctgaaccaccctgagtcctcacagctgtttgccaagctgctccagaaaatgacagacctcagacagattgtcacggaacacgtgcagctactgcaggtgatcaagaagacggagacagacatgagtcttcacccgctcctgcaggagatctacaaggacttgtactagcagagagtcctgagccactgccaacatttcccttcttccagttgcactattctgagggaaaatctgacacctaagaaatttactgtgaaaaagcattttaaaaagaaaaggttttagaatatgatctattttatgcatattgtttataaagacacatttacaatttacttttaatattaaaaattaccatattatgaaattgctgatagta

SEQ ID NO: 572 - protein, 477 aa, Homo Sapiens
MTMVDTEMPFWPTNFGISSVDLSVMEDHSHSFDIKPFTTVDFSSISTPHYEDIPFTRTDPVVADYKYDLKLQEYQSAIKVEPASPPYYSEKTQLYNKPHEEPSNSLMAIECRVCGDKASGFHYGVHACEGCKGFFRRTIRLKLIYDRCDLNCRIHKKSRNKCQYCRFQKCLAVGMSHNAIRFGRMPQAEKEKLLAEISSDIDQLNPESADLRALAKHLYDSYIKSFPLTKAKARAILTGKTTDKSPFVIYDMNSLMMGEDKIKFKHITPLQEQSKEVAIRIFQGCQFRSVEAVQEITEYAKSIPGFVNLDLNDQVTLLKYGVHEIIYTMLASLMNKDGVLISEGQGFMTREFLKSLRKPFGDFMEPKFEFAVKFNALELDDSDLAIFIAVIILSGDRPGLLNVKPIEDIQDNLLQALELQLKLNHPESSQLFAKLLQKMTDLRQIVTEHVQLLQVIKKTETDMSLHPLLQEIYKDLY

SEQ ID NO: 573 - DNA, 1536 bp, Homo Sapiens
ataaatgcgcagcctgagagggggtgagctgacactgtcccagctgccacctagactcggagctccatccaaacctccagcgaagacatcccaggtcgggtgaatcttccagccctgggggtggaggtagtaaaggccatggccatgcagaaaatctttgcccgggaaatcttggactccaggggcaaccccacggtggaggtggacctgcacacggccaagggccgattccgagcagctgtgcccagtggggcttccacgggtatctatgaggctctggaactaagagacggagacaaaggccgctacctggggaaaggagtcctgaaggctgtggagaacatcaacaatactctgggccctgctctgctgcaaaagaaactaagcgttgtggatcaagaaaaagttgacaaatttatgattgagctagatgggaccgagaataagtccaagtttggggccaatgccatcctgggcgtgtccttggccgtgtgtaaggcgggagcagctgagaagggggtccccctgtaccgccacatcgcagatctcgctgggaaccctgacctcatactcccagtgccagccttcaatgtgatcaacgggggctcccatgctggaaacaagctggccatgcaggagttcatgattctgcctgtgggagccagctccttcaaggaagccatgcgcattggcgccgaggtctaccaccacctcaagggggtcatcaaggccaagtatgggaaggatgccaccaatgtgggtgatgaaggtggcttcgcacccaacatcctggagaacaatgaggccctggagctgctgaagacggccatccaggcggctggttacccagacaaggtggtgatcggcatggatgtggcagcatctgagttctatcgcaatgggaagtacgatcttgacttcaagtcgcctgatgatcccgcacggcacatcactggggagaagctcggagagctgtataagagctttatcaagaactatcctgtggtctccatcgaagacccctttgaccaggatgactgggccacttggacctccttcctctcgggggtgaacatccagattgtgggggatgacttgacagtcaccaaccccaagaggattgcccaggccgttgagaagaaggcctgcaactgtctgctgctgaaggtcaaccagatcggctcggtgaccgaatcgatccaggcgtgcaaactggctcagtctaatggctggggggtgatggtgagccaccgctctggggagactgaggacacattcattgctgaccttgtggtggggctctgcacaggacagatcaagactggcgccccctgccgctcggagcgtctggccaaatacaaccaactcatgaggatcgaggaggctcttggggacaaggcaatctttgctggacgcaagttccgtaacccgaaggccaagtgagaagctggaggctccaggactccactggacagacccaggtcttccagacctgcttcctgaaataaacactggtgccaaccaagaaaaaaaaaa

SEQ ID NO: 574 - protein, 434 aa, Homo Sapiens
MAMQKIFAREILDSRGNPTVEVDLHTAKGRFRAAVPSGASTGIYEALELRDGDKGRYLGKGVLKAVENINNTLGPALLQKKLSVVDQEKVDKFMIELDGTENKSKFGANAILGVSLAVCKAGAAEKGVPLYRHIADLAGNPDLILPVPAFNVINGGSHAGNKLAMQEFMILPVGASSFKEAMRIGAEVYHHLKGVIKAKYGKDATNVGDEGGFAPNILENNEALELLKTAIQAAGYPDKVVIGMDVAASEFYRNGKYDLDFKSPDDPARHITGEKLGELYKSFIKNYPVVSIEDPFDQDDWATWTSFLSGVNIQIVGDDLTVTNPKRIAQAVEKKACNCLLLKVNQIGSVTESIQACKLAQSNGWGVMVSHRSGETEDTFIADLVVGLCTGQIKTGAPCRSERLAKYNQLMRIEEALGDKAIFAGRKFRNPKAK

SEQ ID NO: 575 - RNA, 1058 nt, Homo Sapiens
accgaccacaacagcggaagagacaggaaaccaccaagagaagcgccacagacccgccggaaaaaacaaaaacgccaaaaaacggagcaaagggcagaggcggagccgccaaggcggcgcagcgggaccgagcagagaaccaacggagaacagcccaccgagaaaccacaaagcggaacaggacagagaaaggaaaagaagaagaagaccaaaaaaagagacccacacccagcaacacccaccagagaagagcgaaagggacgcaaggaacaaaaggaaacgcaccaaggcaggagccaaagagccaaagaacacaagcgacggagaggagagggagcaccagaggacacaggagagaccaggaggggaaaacgacccccaggaaaaagaaaaggaccggaaacacaaaaaggaaaaaaaaagaccaaacgagacagaggccagaagaagaaacgcgcaacgggagaagaaaaagagacacacaaacacccacacaaaaaaaacacagcaagggaacaaacccagcaagccaagcaagaaaaaaaggcaaaaaaaaaaaccagaaaaacggaaagagacaagagcgcggcacaaacgaaaaaagaaaaagggaaaaaacaggaaagcaaaaaacagagagacagaccccaacgaggacgaaaaggaacaagggacccgggaagaaagccaacgcgaagaaccgagaagcaagggagaggagaaaccgacaaaaaaaagccagacacaaaaccagcgaaagaggagacgaccgaagaacaccacagcacgaagacagaagaaaacaggaagggagaaacaaacgccccaaggccgccacaaacaaacgggaggcacacaggagcaacacagagaacaggccaagacacaaaaccccggacgaaaccagaaaacaacagagaagccggaagcaaaaaaccaagagaagcaagaagcaaggcccaaagagaaacagaacaccaaagaggaaacagcagcacacagaaacaagaaaaagcacggaaggaaaagaagcgacaagcaacaaaaaaagagaaaca

SEQ ID NO: 576 - DNA, 1947 bp, Homo Sapiens
acagtgtccagaatgctggagcgtaggtgaaaggacaaaagccagacacatttcaacatgagggacccactgacagattgtccgtataataaagtatacaagaacctaaaggagttttctcaaaatggagagaatttctgcaaacaggtcacatctgttcttcagcaaagggcaaacctggaaattagctatgccaaaggacttcagaaactggcaagcaagctgagcaaagcattacagaacacgagaaaaagttgtgttagcagtgcctgggcctgggcctcagagggaatgaaatccacagcggacctgcatcaaaaacttggcaaagcaattgaattggaagcaataaaaccgacttatcaagtcctaaatgtacaagagaagaagagaaaatcacttgacaatgaagttgaaaagacagcaaatcttgtcattagcaactggaatcagcaaattaaggccaagaagaaattaatggttagtaccaagaaacatgaagcacttttccagcttgtagaaagctccaagcaatctatgactgagaaggagaagcggaagctcctcaataaactgacaaaatcaactgaaaagttggaaaaggaagatgaaaattactaccaaaaaaacatggcgggttattctaccagactgaaatgggaaaacacactagagaactgctaccagagcattctggagctggagaaggaaagaattcaacttttatgcaataacttaaaccagtacagccaacatatttctctttttggccaaaccctgaccacatgccacacgcagattcactgtgccatcagcaagattgacattgaaaaagatatccaggctgtaatggaagaaactgcaattttatctacagaaaacaaatctgagttcctgttaacggattactttgaagaagatcctaacagtgcaatggataaagagagacgaaagtctttactaaaaccaaaattattgagactgcagagagacattgaaaaagcctcaaaagacaaggaaggcctggaacgaatgcttaaaacgtactccagcacctcctccttctctgatgcaaagagccagaaagacacagcagcgttaatggatgagaacaatttgaaactagaccttttggaagcgaactcctacaaactgtcatcaatgttagcagaacttgagcaaagacctcaacccagccatccttgtagtaattccatcttcaggtggagggaaaaggagcatactcatagctatgtgaaaatatctcggccttttttaatgaagagattagagaatattgtgagcaaggcatcttctggtgggcagagcaatccaggttcttcaactccagcccctggtgcagcccagctcagcagcagactttgcaaggccttgtattcttttcaagccaggcaagatgatgagttgaatttggaaaagggtgacattgtgattatacacgagaaaaaagaaggaggatggtggtttggatctttgaatgggaaaaaaggccattttcctgccgcttatgtggaggagttaccttcaaatgctggcaacacagctacaaaggcataaaacaagactctgaacatactaccttcacactcggtaatcaacaatacagtgtggttcaaataagaataaagtgctcttacctttacatgtttttcttttgaaatggatggagttctacctgcatgtcacagcactttgcattcatgattattagcttgaaacagtcagaaaaaagatggatgggtggagacagacaaggaagaggctccttggttcctagaggagtttccaaattctaggagaccctagagatgatccagtataacccctggtgtcacagaaacagacggagtccaaggtgggttcagctgcttgcctgaagtcagagttatctggtagacaacagcagtgggacttagatgtcttttt

SEQ ID NO: 577 - protein, 506 aa, Homo Sapiens
MRDPLTDCPYNKVYKNLKEFSQNGENFCKQVTSVLQQRANLEISYAKGLQKLASKLSKALQNTRKSCVSSAWAWASEGMKSTADLHQKLGKAIELEAIKPTYQVLNVQEKKRKSLDNEVEKTANLVISNWNQQIKAKKKLMVSTKKHEALFQLVESSKQSMTEKEKRKLLNKLTKSTEKLEKEDENYYQKNMAGYSTRLKWENTLENCYQSILELEKERIQLLCNNLNQYSQHISLFGQTLTTCHTQIHCAISKIDIEKDIQAVMEETAILSTENKSEFLLTDYFEEDPNSAMDKERRKSLLKPKLLRLQRDIEKASKDKEGLERMLKTYSSTSSFSDAKSQKDTAALMDENNLKLDLLEANSYKLSSMLAELEQRPQPSHPCSNSIFRWREKEHTHSYVKISRPFLMKRLENIVSKASSGGQSNPGSSTPAPGAAQLSSRLCKALYSFQARQDDELNLEKGDIVIIHEKKEGGWWFGSLNGKKGHFPAAYVEELPSNAGNTATKA

SEQ ID NO: 578 - DNA, 3346 bp, Homo Sapiens
gcggaggcgggcgcgcgccccgcaggggagggggcggagagcgcgagaaggagggaggaggcgtccccgtgcgggagcccggctgaccgcgccagacccagacagagcatcgcggctttggctgcaacaggcggtgggctcggctcgggggcggaggcggcgaaagggcggggagcgcgaggaggagcgacctggcctcaccgctgccgcctcttccccgccgcatggacgagcgcctcagccttctgcgctcgccgccgccgccctcagcccgccaccgcgcccaccctcctcagcgcccagcgagcagcggcggtgcccacacgctggtgaaccacggctacgcggagcccgccgcaggccgcgagctgccgcccgacatgaccgtggtgcccggggaccacctgctggagccggaggtggccgatggtggaggggccccgcctcaaggcggctgtggcggcggcggctgcgaccgctacgagccgctgccgccctcactgccggccgcgggcgagcaggactgctgcggggagcgcgtggtcatcaacatctccgggctgcgcttcgagacgcagctgaagaccctttgccagttccccgagacgctgctgggcgaccccaagcggcgcatgaggtacttcgacccgctccgcaacgagtacttcttcgaccgcaaccggcccagcttcgacgccatcctctactactatcagtccgggggccgcatccgccggccggtcaacgtgcccatcgacattttctccgaggagatccgcttctaccagctgggcgaggaggccatggagaagttccgcgaggacgagggcttcctgcgggaggaggagcggcccttgccccgccgcgacttccagcgccaggtgtggctgctcttcgagtaccccgagagctccgggccggcccggggcatcgccatcgtgtccgtgctggtcatcctcatctccattgtcatcttctgcctggagacgctgccggagttccgcgacgagaaggactaccccgcctcgacgtcgcaggactcattcgaagcagccggcaacagcacgtcggggtcccgcgcaggagcctccagcttctccgatcccttcttcgtggtggagacgctgtgcatcatctggttctccttcgaactgctggtgcggttcttcgcttgtcctagcaaagccaccttctcgcgaaacatcatgaacctgatcgacattgtggccatcattccttattttatcactctgggtaccgagctggccgaacgacagggcaatggacagcaggccatgtctctggccatcctgagggtcatccgcctggtaagggtcttccgcatcttcaagctgtcgcgccactccaaggggctgcagatcctcgggcaaacgctgaaggcgtccatgcgggagctgggattgctcatcttcttcctctttattggggtcatccttttctccagcgcggtctactttgccgaggcagacgaccccacttcaggtttcagcagcatcccggatgccttctggtgggcagtggtaaccatgacaacagtgggttacggcgatatgcacccagtgaccatagggggcaagattgtgggatctctctgtgccatcgccggtgtcttgaccatcgcattgccagttcccgtgattgtttccaacttcaattacttctaccaccgggagacagaaggggaagagcaatcccagtacatgcacgtgggaagttgccagcacctctcctcttcagccgaggagctccgaaaagcaaggagtaactcgactctgagtaagtcggagtatatggtgatcgaagaggggggtatgaaccatagcgctttcccccagacccctttcaaaacgggcaattccactgccacctgcaccacgaacaataatcccaactcttgtgtcaacatcaaaaagatattcaccgatgtttaatatgtgatacaagtgacatgctgtgctcagtattgtgtggaacgtgcccccttggtctgcctatgcccttgttttatacatttccagaccattcatcaaggaaaggacctgaagaagtggaaagcacacttcattctccctctccctgctgcttcatactgaaacaggtgcctgttttgcaagtgggctgcattctctcagctctccttttccctcttaccctctctctcttaacattgtaaacaacagacttacgttaaacttcatttctagtacacgccctatttaaaaaagagcagtacatcctgggaggaaatgaaactaaagaacagttagagtaactgtttaacctcagaattttaaaggcagttgtttctttcctaagcacatcaattcgtagtaaatgatgcttcggtttgatggacctttcaacgttatttattgaatatgtatttcggttgcctaccctgtagatatgtggatgaagagtctaactagaataatgacttgtaaacccaccatgagttatttggtttttgacttaaattcctatttgaatcccctttcccggaattttaagtgtctctacaactttgaataaagggaaatgcccaagatgtcctgatctgactaattagtttaattctttcgggcttgctaagcatttctaaagcattagactaacagattcctgtgaagttctgtgcatatgtcccagccccaacaactatcaaagtctagaaacagatgttttcagtgttgctgagagaaacaaaaaatttcctaatgcatctgagagataagcttcggcagtatcacaagaagattaaagtggcagacaccccttccagcggaagttactaattcggacctgactgatgcagtttccatagcaacccatgtttcctgggaaacccgaaaaaggttgtcatggcatctcttgctctctagccccacctcccagcccctgccgtttccacagtaacctttccagatggttcctacttaaatgatttcataaggaaaaccactgtttgaataagccgcacaaaaaataaagttaagtctgagactctaaggaggtgaaatgaatcccaaatgcattttttaactatgaaaatcattatgtcattccataatgactgaatcaaggaggaaaatatggtgtttggaatgttagatattaaccacaataaggcatgatctggattaaatgccatttattaggcaataatttttaaagatgcttctctacagttttctttctccaagaactttcaagccaacaaatgaaatttaaaagcaaatgtaaaagtgttctgtacataagcaaatgagagattcgatcagtgtgcctgaaaccttactacaagggaccttcaggctttctcttt

SEQ ID NO: 579 - protein, 575 aa, Homo Sapiens
MDERLSLLRSPPPPSARHRAHPPQRPASSGGAHTLVNHGYAEPAAGRELPPDMTVVPGDHLLEPEVADGGGAPPQGGCGGGGCDRYEPLPPSLPAAGEQDCCGERVVINISGLRFETQLKTLCQFPETLLGDPKRRMRYFDPLRNEYFFDRNRPSFDAILYYYQSGGRIRRPVNVPIDIFSEEIRFYQLGEEAMEKFREDEGFLREEERPLPRRDFQRQVWLLFEYPESSGPARGIAIVSVLVILISIVIFCLETLPEFRDEKDYPASTSQDSFEAAGNSTSGSRAGASSFSDPFFVVETLCIIWFSFELLVRFFACPSKATFSRNIMNLIDIVAIIPYFITLGTELAERQGNGQQAMSLAILRVIRLVRVFRIFKLSRHSKGLQILGQTLKASMRELGLLIFFLFIGVILFSSAVYFAEADDPTSGFSSIPDAFWWAVVTMTTVGYGDMHPVTIGGKIVGSLCAIAGVLTIALPVPVIVSNFNYFYHRETEGEEQSQYMHVGSCQHLSSSAEELRKARSNSTLSKSEYMVIEEGGMNHSAFPQTPFKTGNSTATCTTNNNPNSCVNIKKIFTDV

SEQ ID NO: 580 - DNA, 7238 bp, Homo Sapiens
gcactccggccgggctctgctggctgcggcgggagctggacgcgggaggaggcggcggcggcgctggaacagtgaaccatggagctgtatttcggtgaatatcaacatgtgcagcaggaatatggggtccatctgagactcgcaagtgatgatacccaaaaatcaaggagttcccagaactccaaggcaggctcctacggtgtcagtattcgggtccagggaattgatggtcacccctatattgtcctgaataacacagaacggtgcctagcaggcacatcgttttctgaaaatgggccaccctttccacctccagtgataaataacctgcctctacattccagcaatggttctgtgccaaaggagaacagtgaagaacttcagcttccagaaaacccatacgcccagcctagcccaataagaaacctgaaacagcccctgctccatgagggcaagaatggagttctagatcgcaaagacgggtctgtgaagccatctcacctgctgaactttcagaggcatccagagcttttgcaaccctatgaccctgaaaagaatgagttgaatttacaaaatcaccagccttctgagagtaattggctaaaaacgttgacagaagaaggcatcaacaataagaagccttggacttgctttcccaaacctagcaattcccagcctaccagtccctccttggaagacccggccaaatctggtgtgacagctattcgtttatgcagctccgtggtcatagaggaccccaaaaagcagacctcagtgtgtgtaaacgttcagagctgcaccaaggagagggtgggagaggaggcccttttcactagcgggaggcccctgactgcccacagcccacatgcccaccctgaaaccaagaaaaccaggccagatgttcttcccttccggcgacaggattcagcgggacccgtcctggatggagctcggtcccggaggtcctcctcgtcatccacaactcccacgtcagccaactctttgtacaggtttttactggatgatcaggaatgtgccatccatgccgacaacgtcaatcgtcatgaaaacagaaggtatattcccttcctgccaggaactggacgggatattgatacaggatcaattcctggtgtggatcagttaattgaaaaatttgatcaaaaacctgggcttcagagaagaggaaggtctgggaagcgaaacagaattaatacagatgacaggaaaagatccagaagcgtggatagcgcctttccttttggcctccaagggaactcggagtacctgattgaattcagtaggaacttgggcaagtcaagcgaacacctcctccggccttcccaggtgtgcccgcagcggccactgtctcaggagcgccgtgggaaacagagcgtgggccgcacctttgcaaagctgcagggagcagcgcacggggcttcatgtgcccactccaggcctccccagccgaacatagatgggaaagttctggaaaccgaaggtagtcaggaaagtacagtgatccgtgcgccctcccttggtgcacagagtaaaaaggaggaggaggtgaaaacagccaccgctacgctgatgttacagaaccgggcaacagcaacttcgcctgattctggtgccaagaaaatttccgtgaagacatttccttcggcctcaaatactcaggccacaccggatctcttaaagggccagcaagagctcactcagcaaaccaatgaggagacagctaagcagattctctacaattacctcaaagaaggaagcactgataatgacgatgctactaaaaggaaagtcaacttggtctttgagaaaatccagaccttaaagtctcgagcagctgggagcgcccaaggaaataaccaagcttgtaattccacatctgaagtcaaagatctattggaacagaaaagcaagttgaccatagaagtggctgaacttcagagacagcttcaactggaagtcaagaatcaacagaacattaaagaagagagagagaggatgagagcaaacctagaagagctccgaagccaacacaacgaaaaggtggaggagaactccacattgcagcaacgactggaagaaagtgaaggggagctccggaagaatctggaggagctattccaggtgaagatggaacgggagcagcatcagactgagatcagggatctccaggaccagctctcagaaatgcacgatgaactggacagtgcaaagcgatcggaggacagggagaagggagctctgattgaggagctcttacaggcaaaacaggatcttcaagatctgctgattgccaaagaggagcaagaagacctcttgagaaagcgagagcgtgaactcaccgccctgaagggagccctgaaagaagaggtttccagccatgatcaggagatggacaagctgaaggagcaatatgatgctgagttgcaggccctgagggagagtgtggaagaagcaaccaagaatgtcgaggtcttggcgagcaggagcaacacttcagagcaagaccaggcggggactgaaatgcgcgtgaagcttctgcaggaggagaatgagaagctgcagggaagaagcgaagagctggagcggagagttgctcagcttcaaaggcagatcgaggacctgaaaggcgatgaagccaaggcgaaggaaacgctgaagaagtacgagggagaaatacgacagttagaggaggcccttgtgcacgccagaaaggaagaaaaagaagctgtgtcagccagaagggccctggagaatgaactggaggctgctcagggaaatctgagtcagactacccaggagcagaagcagttgtctgagaagctcaaagaggagagtgagcagaaggagcagctaagaaggttgaagaacgagatggagaatgagcggtggcacctgggcaaaaccattgagaaactgcagaaggagatggcagacattgttgaggcctcccgtacctcaaccctggagctccagaaccagctggatgagtataaggagaaaaaccgcagggagctcgcagaaatgcaaagacagttgaaggagaaaacgctggaggcagaaaagtcccgactgacagccatgaaaatgcaggatgagatgcgtctgatggaggaagagttacgggactaccagagagctcaggatgaagcactcacaaaaaggcagcttctggagcagacgctgaaggacctggagtatgagctggaagccaagagtcacctcaaagatgaccgcagcaggctggtcaagcagatggaggacaaggtgtctcaactggagatggaactggaagaagagagaaacaactcagatttgctgtctgagaggatcagtaggagcagggaacagatggagcagttgaggaatgagctacttcaggagagagctgcgagacaagacttggagtgcgacaagatttccctggagaggcagaacaaggacttaaagagccggattatccacctggaaggttcctacaggtccagcaaagaggggctggttgtgcagatggaggccaggatcgcggagctggaggaccgcctggagagtgaggagagggatcgggccaatcttcagctcagcaaccggcggctggagcggaaagtgaaggagctggtgatgcaggtggatgatgagcacctgtcattgactgatcagaaggaccagctgagcttgcgtttgaaagccatgaagcggcaggtggaggaggctgaggaggaaatcgacagactggaaagttctaaaaagaagctgcagagggagctggaggagcagatggacatgaatgagcatctgcaggggcagctcaactccatgaagaaggacttaagactgaagaagctgccgagtaaagtgctggatgacatggatgacgacgatgacctcagcacggatgggggaagcctctatgaggcgcctgtgagctacacattctccaaggacagcaccgtcgccagccagatctgagtgctctcccgggctgtggaagtacctgtcattcctgcaggagctgcagccacccaaagtgggaggcagggaggggagcatctgtctgccactgagaccaatcacagcctctttgcacagcatgccagctcctcagtgttacattcctcgccagggtctctcagtgggtcttcgacagagagcttttgcagtttaaaatgttgggatgcctgaggaccaggagccaccacccactggggtgttgtgagagatacactttggtaggctgaggcccctgttccacagccactatttgcattgctgtccctgccccctcatcactccccctgccaagacaaagggtccagaaggctaggacttacttaatagcactgtgcagggaggaaaccatgtatagcttgtacatattttaaaccagaccttctcacgaactgctgctgttgggtttggaatgtgatggaggcttggtagggtggctggtttgtaaagttcatgcatctatattgagtattctttttttttttttttgagatggagtttcattcttgttgccgaggctggagtgcaatggcgcaaccttggctcactgcaacctctgcctccctggttcaagtgattctcctgcctcatcctcccaagaagctgagattacagatgaccaccaccactcctggctaattttttgtatttagtagagacggggtttcaccatgttggtcaggctggtcttgaactcctgacctcaggtgatccacctgcctcagcctcccaaagtgctgagattacaggcatgagccaccacgcccagccattgagtattcttttttaaaatatgaagctattagattttaagtgttgaggagcagaggtgagaagagagagagagagagaaagtcaaataaagtcaaagaccagtttggaaaccaaagttggaaaagaagaattgtagtggtcatggacagctaagactgagcatagcagttcacatggtctgggtaaacaagtcactggcacaggggaaagccagaaggttgcttgtgtctgtgactgcagctatggccttgtttgcttagtttatctggaattctgttataatttctgaactgttctgagacctgttcccagtcactgattgcaatttcttttacacaggttgggtagggagagttgtaggtaaggccttaaacaaatgaggccgtttctggaaggatagggctgtgtggtcatgtcccacagcaagcttttgggatcgggggaataagagggtatgggggaaaggttcatagacttaggtgtgagaatgaggtgggaggtgtctggtaaggtcatgggggaagggagatgagagaggagataggcagatgtgggtatggggcccagtgtgagaaggaagacagagaagttcttgaaagctgggggatgtgtgggcaagaggtggattgagcaggatctcagggttatgtcgaggaagggaagaaagaaacagaagtcaggcagaggcgtgtctgtgcaaactggaggactccttccaacttcctggaacaaagcgacatcgccagcagcaggctggcagggagtggttgaggtctgggggccaggccacatggctggagaggaatttcagggagcatagcatcgggaggatgctacatatccagggactccctcctggccttcctgtgtcacttcacaatgtgacagtccccaggcatgcccacaggccaggcccagtcacagctgggcttccacaggtcagaatatgggacaggacatggtcagggagaggaccctgtgagttggtgacatatatgtggcagagatggtagtgttcagctgcttcagcagtgtccccaaccatcccaatagggtgggggcctgtgggccagaggactccatgacagtagccatggagtcccacctgtgccaggtcagagcccacccggcaggtttcagagtggtcagcccagtttaagggtgggagtctggagccagacagccaagccccttccacatctacagggtcactgtcatcctcaccacagccaggggtgattctcacctctgcctgcttatgtggggtgtggccgattcctccctttagtcattcattcatttagcacatatttattgggcatcggtgatgtgtcaggcacagtccttggcacacagaatacagcagtgaattaaacaggcaaaaattcctcccctcctggagctcagtgtcaggaaagggggtgataaatgacaatcaaatcgacatggaggttgagcacctctgtactcagccctctgtctgtccttctgaggacgcaacaagcctggttccctagagctcactttgaccctcaatatgttcataatttccctgctgcttctcccatcgttagacatctgccagtaagcctgctgagagaagcctcagcccactcatacctagagacgctgctggggaaggtcagcacacccaagaactttgggagtgtgtgtctgttttggtttgtgagaaagtagctgcccctcattctggccagttctttccagtagccatggggctggctacaagaagcaaaactgcccatgcaaagagaacacaggtcacttttcaaaacacttgcatcattaccctaaaaataggctgttatgcgttttgacaattgcgctatcctacactctgagggagttggcaacgcatgcggtatagtggagtgggaagagttgagactgaaagttaagagaagggttttcaagtcccggctcatctcaccccagtgactttgacagtgtgctcactctcagagccatggattacctggaacaaagtgcagattagtgcccacggtcctttccaggtataacatgctatcgttctttaattttattatatatacatacttttcttctgttttttgctttaagaactaaccccgatcaagagtattttctttagctagcttaaaaagaaaacatatattttatgtaaaaacacatacatggccaaatgcaatactgaagagacaatcatcctgtatcttttatggtttttcctgcttctgagtgtcgttctacaatgcccgttgacttattccattgcgtctctgctttagggtatggtttggtcgctttggttgtcatgagaaagagacattctccttgcagctacctccatgtgagtgaattcctggataaagcaagatttcctttcaataaacgctgtcacccaatgggaattttgactctaaaaaaaaaaaaaa

SEQ ID NO: 581 - protein, 1302 aa, Homo Sapiens
MELYFGEYQHVQQEYGVHLRLASDDTQKSRSSQNSKAGSYGVSIRVQGIDGHPYIVLNNTERCLAGTSFSENGPPFPPPVINNLPLHSSNGSVPKENSEELQLPENPYAQPSPIRNLKQPLLHEGKNGVLDRKDGSVKPSHLLNFQRHPELLQPYDPEKNELNLQNHQPSESNWLKTLTEEGINNKKPWTCFPKPSNSQPTSPSLEDPAKSGVTAIRLCSSVVIEDPKKQTSVCVNVQSCTKERVGEEALFTSGRPLTAHSPHAHPETKKTRPDVLPFRRQDSAGPVLDGARSRRSSSSSTTPTSANSLYRFLLDDQECAIHADNVNRHENRRYIPFLPGTGRDIDTGSIPGVDQLIEKFDQKPGLQRRGRSGKRNRINTDDRKRSRSVDSAFPFGLQGNSEYLIEFSRNLGKSSEHLLRPSQVCPQRPLSQERRGKQSVGRTFAKLQGAAHGASCAHSRPPQPNIDGKVLETEGSQESTVIRAPSLGAQSKKEEEVKTATATLMLQNRATATSPDSGAKKISVKTFPSASNTQATPDLLKGQQELTQQTNEETAKQILYNYLKEGSTDNDDATKRKVNLVFEKIQTLKSRAAGSAQGNNQACNSTSEVKDLLEQKSKLTIEVAELQRQLQLEVKNQQNIKEERERMRANLEELRSQHNEKVEENSTLQQRLEESEGELRKNLEELFQVKMEREQHQTEIRDLQDQLSEMHDELDSAKRSEDREKGALIEELLQAKQDLQDLLIAKEEQEDLLRKRERELTALKGALKEEVSSHDQEMDKLKEQYDAELQALRESVEEATKNVEVLASRSNTSEQDQAGTEMRVKLLQEENEKLQGRSEELERRVAQLQRQIEDLKGDEAKAKETLKKYEGEIRQLEEALVHARKEEKEAVSARRALENELEAAQGNLSQTTQEQKQLSEKLKEESEQKEQLRRLKNEMENERWHLGKTIEKLQKEMADIVEASRTSTLELQNQLDEYKEKNRRELAEMQRQLKEKTLEAEKSRLTAMKMQDEMRLMEEELRDYQRAQDEALTKRQLLEQTLKDLEYELEAKSHLKDDRSRLVKQMEDKVSQLEMELEEERNNSDLLSERISRSREQMEQLRNELLQERAARQDLECDKISLERQNKDLKSRIIHLEGSYRSSKEGLVVQMEARIAELEDRLESEERDRANLQLSNRRLERKVKELVMQVDDEHLSLTDQKDQLSLRLKAMKRQVEEAEEEIDRLESSKKKLQRELEEQMDMNEHLQGQLNSMKKDLRLKKLPSKVLDDMDDDDDLSTDGGSLYEAPVSYTFSKDSTVASQI

SEQ ID NO: 582 - DNA, 4122 bp, Homo Sapiens
gcgagcgaagggagcgctctgggatgggacttggagcaagcggcggcggcggagacagaggcagaggcagaagctggggctccgtcctcgcctcccacgagcgatccccgaggagagccgcggccctcggcgaggcgaagaggccgacgaggaagacccgggtggctgcgcccctgcctcgcttcccaggcgccggcggctgcagccttgcccctcttgctcgccttgaaaatggaaaagatgctcgcaggctgctttctgctgatcctcggacagatcgtcctcctccctgccgaggccagggagcggtcacgtgggaggtccatctctaggggcagacacgctcggacccacccgcagacggcccttctggagagttcctgtgagaacaagcgggcagacctggttttcatcattgacagctctcgcagtgtcaacacccatgactatgcaaaggtcaaggagttcatcgtggacatcttgcaattcttggacattggtcctgatgtcacccgagtgggcctgctccaatatggcagcactgtcaagaatgagttctccctcaagaccttcaagaggaagtccgaggtggagcgtgctgtcaagaggatgcggcatctgtccacgggcaccatgactgggctggccatccagtatgccctgaacatcgcattctcagaagcagagggggcccggcccctgagggagaatgtgccacgggtcataatgatcgtgacagatgggagacctcaggactccgtggccgaggtggctgctaaggcacgggacacgggcatcctaatctttgccattggtgtgggccaggtagacttcaacaccttgaagtccattgggagtgagccccatgaggaccatgtcttccttgtggccaatttcagccagattgagacgctgacctccgtgttccagaagaagttgtgcacggcccacatgtgcagcaccctggagcataactgtgcccacttctgcatcaacatccctggctcatacgtctgcaggtgcaaacaaggctacattctcaactcggatcagacgacttgcagaatccaggatctgtgtgccatggaggaccacaactgtgagcagctctgtgtgaatgtgccgggctccttcgtctgccagtgctacagtggctacgccctggctgaggatgggaagaggtgtgtggctgtggactactgtgcctcagaaaaccacggatgtgaacatgagtgtgtaaatgctgatggctcctacctttgccagtgccatgaaggatttgctcttaacccagataaaaaaacgtgcacaaagatagactactgtgcctcatctaatcacggatgtcagcacgagtgtgttaacacagatgattcctattcctgccactgcctgaaaggctttaccctgaatccagataagaaaacctgcagaaggatcaactactgtgcactgaacaaaccgggctgtgagcatgagtgcgtcaacatggaggagagctactactgccgctgccaccgtggctacactctggaccccaatggcaaaacctgcagccgagtggaccactgtgcacagcaggaccatggctgtgagcagctgtgtctgaacacggaggattccttcgtctgccagtgctcagaaggcttcctcatcaacgaggacctcaagacctgctcccgggtggattactgcctgctgagtgaccatggttgtgaatactcctgtgtcaacatggacagatcctttgcctgtcagtgtcctgagggacacgtgctccgcagcgatgggaagacgtgtgcaaaattggactcttgtgctctgggggaccacggttgtgaacattcgtgtgtaagcagtgaagattcgtttgtgtgccagtgctttgaaggttatatactccgtgaagatggaaaaacctgcagaaggaaagatgtctgccaagctatagaccatggctgtgaacacatttgtgtgaacagtgatgactcatacacgtgcgagtgcttggagggattccggctcgctgaggatgggaaacgctgccgaaggaaggatgtctgcaaatcaacccaccatggctgcgaacacatttgtgttaataatgggaattcctacatctgcaaatgctcagagggatttgttctagctgaggacggaagacggtgcaagaaatgcactgaaggcccaattgacctggtctttgtgatcgatggatccaagagtcttggagaagagaattttgaggtcgtgaagcagtttgtcactggaattatagattccttgacaatttcccccaaagccgctcgagtggggctgctccagtattccacacaggtccacacagagttcactctgagaaacttcaactcagccaaagacatgaaaaaagccgtggcccacatgaaatacatgggaaagggctctatgactgggctggccctgaaacacatgtttgagagaagttttacccaaggagaaggggccaggcccctttccacaagggtgcccagagcagccattgtgttcaccgacggacgggctcaggatgacgtctccgagtgggccagtaaagccaaggccaatggtatcactatgtatgctgttggggtaggaaaagccattgaggaggaactacaagagattgcctctgagcccacaaacaagcatctcttctatgccgaagacttcagcacaatggatgagataagtgaaaaactcaagaaaggcatctgtgaagctctagaagactccgatggaagacaggactctccagcaggggaactgccaaaaacggtccaacagccaacagaatctgagccagtcaccataaatatccaagacctactttcctgttctaattttgcagtgcaacacagatatctgtttgaagaagacaatcttttacggtctacacaaaagctttcccattcaacaaaaccttcaggaagccctttggaagaaaaacacgatcaatgcaaatgtgaaaaccttataatgttccagaaccttgcaaacgaagaagtaagaaaattaacacagcgcttagaagaaatgacacagagaatggaagccctggaaaatcgcctgagatacagatgaagattagaaatcgcgacacatttgtagtcattgtatcacggattacaatgaacgcagtgcagagccccaaagctcaggctattgttaaatcaataatgttgtgaagtaaaacaatcagtactgagaaacctggtttgccacagaacaaagacaagaagtatacactaacttgtataaatttatctaggaaaaaaatccttcagaattctaagatgaatttaccaggtgagaatgaataagctatgcaaggtattttgtaatatactgtggacacaacttgcttctgcctcatcctgccttagtgtgcaatctcatttgactatacgataaagtttgcacagtcttacttctgtagaacactggccataggaaatgctgtttttttgtactggactttaccttgatatatgtatatggatgtatgcataaaatcataggacatatgtacttgtggaacaagttggattttttatacaatattaaaattcaccacttcagagaatggtattcagtgcaaaaattcttagtttaactttaaatggaagatatgtatgtatgagaaatggccaacatgcctatgaaaaaaatgctgaatctcatcagtaatcaggaaaatgcaggttaaaacaataccatttttcacccatcagcttagcaaaaatgagtatattttttaacaagtgttggtaaggatgtggaaatgtgaggttcttgtagtaagaatgcaaatggcactctttgtagagtaagtctgttgacatctcataaaactgaaaatgcacacaaccctgtaaatctagcaactgcactcagttgatttcagcccatacatacaaagagacctgcataagaatgttactaggctttgtaaaagcaaaaaataaggaacaacttaaacatcatcagaaggggaactgataaactctggtgtaatccataccacagaaatacaacaccgcatgtacaggaatgtgctacatctatacaaataaatggtcaaactcaaaaaaaaaaaaaaaa

SEQ ID NO: 583 - protein, 956 aa, Homo Sapiens
MEKMLAGCFLLILGQIVLLPAEARERSRGRSISRGRHARTHPQTALLESSCENKRADLVFIIDSSRSVNTHDYAKVKEFIVDILQFLDIGPDVTRVGLLQYGSTVKNEFSLKTFKRKSEVERAVKRMRHLSTGTMTGLAIQYALNIAFSEAEGARPLRENVPRVIMIVTDGRPQDSVAEVAAKARDTGILIFAIGVGQVDFNTLKSIGSEPHEDHVFLVANFSQIETLTSVFQKKLCTAHMCSTLEHNCAHFCINIPGSYVCRCKQGYILNSDQTTCRIQDLCAMEDHNCEQLCVNVPGSFVCQCYSGYALAEDGKRCVAVDYCASENHGCEHECVNADGSYLCQCHEGFALNPDKKTCTKIDYCASSNHGCQHECVNTDDSYSCHCLKGFTLNPDKKTCRRINYCALNKPGCEHECVNMEESYYCRCHRGYTLDPNGKTCSRVDHCAQQDHGCEQLCLNTEDSFVCQCSEGFLINEDLKTCSRVDYCLLSDHGCEYSCVNMDRSFACQCPEGHVLRSDGKTCAKLDSCALGDHGCEHSCVSSEDSFVCQCFEGYILREDGKTCRRKDVCQAIDHGCEHICVNSDDSYTCECLEGFRLAEDGKRCRRKDVCKSTHHGCEHICVNNGNSYICKCSEGFVLAEDGRRCKKCTEGPIDLVFVIDGSKSLGEENFEVVKQFVTGIIDSLTISPKAARVGLLQYSTQVHTEFTLRNFNSAKDMKKAVAHMKYMGKGSMTGLALKHMFERSFTQGEGARPLSTRVPRAAIVFTDGRAQDDVSEWASKAKANGITMYAVGVGKAIEEELQEIASEPTNKHLFYAEDFSTMDEISEKLKKGICEALEDSDGRQDSPAGELPKTVQQPTESEPVTINIQDLLSCSNFAVQHRYLFEEDNLLRSTQKLSHSTKPSGSPLEEKHDQCKCENLIMFQNLANEEVRKLTQRLEEMTQRMEALENRLRYR

SEQ ID NO: 584 - DNA, 1973 bp, Homo Sapiens
ctttgaaaaagacttcttttgagctaactttcttatactggtacctttctaatctcactacaatatgtaacattggtgttcgatctcaagtatttctgaatatattcccctatccacagaaatatactctgggggaaaaaaaatagaacaaattcttgccgtcctgaccattgaacaagagactaattagacaatggggctagaaaaacctcaaagtaaactggaaggaggcatgcatccccagctgataccttcggttattgctgtagttttcatcttacttctcagtgtctgttttattgcaagttgtttggtgactcatcacaacttttcacgctgtaagagaggcacaggagtgcacaagttagagcaccatgcaaagctcaaatgcatcaaagagaaatcagaactgaaaagtgctgaagggagcacctggaactgttgtcctattgactggagagccttccagtccaactgctattttcctcttactgacaacaagacgtgggctgagagtgaaaggaactgttcagggatgggggcccatctgatgaccatcagcacggaagctgagcagaactttattattcagtttctggatagacggctttcctatttccttggacttagagatgagaatgccaaaggtcagtggcgttgggtggaccagacgccatttaacccacgcagagtattctggcataagaatgaacccgacaactctcagggagaaaactgtgttgttcttgtttataaccaagataaatgggcctggaatgatgttccttgtaactttgaagcaagtaggatttgtaaaatacctggaacaacattgaactagaaactcagaaagtggtccttgtgatggaaagagaaaagaaaaaccaattagaataaggcagaatgtacgtgcgtcattggaacacagaaaacatgctggttcatacagcgtttttagtcataatggtcttttttattttgtttgattcattcgagacaacatgtgtgtatgtgtgtgtgtgtgtgtgtagataatgtggtttttgtatggtgtttgatggaaggaataatctttctttgctttcttagtagtatttcaaggtgtttacttttcaattggtgtgcactgaatgcatgtatggaagaatagcgtgaataatgcaatctctttgtcatttttccccttctcagactcttagctcttaaaattcaaagatgggatattctaactggtagtggtgcatcatttttaacccaaatattgcaagcactttaaagatttgaaaccacatttttattgtttgatgtttcattttcagactttttaatgtcagtcattacaattacattgcatgaggaaaatttttccagaacaacagtgtggaatagttctgaattatgctgttctacagatagaaaaaaagtccaaatgcctttaaaaatttacttcttactccacccaacacgtttttgcaaagcaagaagtctttgtaagacaccttaaacaaagtccttcaattctacagcagaggaaataaaatcccccagaagccaaagggctcaccttcacattgttagttcatgacagacccaggtgtgcttcattagagataacatacattccctttggtatcacaggaagttactggggattactcgacctcattacttagctaacgactggataaaatttcttaattgtttgaagtaacattgtattcgtgtttgcattattaatttgaatagaaaataatcacattttcaacccatttatacaaattgttaatgtttctttagagctgtataactatagtttgaactagcaaggaagttattgttttgacaaccagaaattatgcttttctggtgcatgaaacattaattgcaaagggcagtcacatccaactttaataaaatatggtggtctttcttaaaaaaaaaaaaaaaaaaaaaaaaaaaaaaaaaaaaaaaaa

SEQ ID NO: 585 - protein, 215 aa, Homo Sapiens
MGLEKPQSKLEGGMHPQLIPSVIAVVFILLLSVCFIASCLVTHHNFSRCKRGTGVHKLEHHAKLKCIKEKSELKSAEGSTWNCCPIDWRAFQSNCYFPLTDNKTWAESERNCSGMGAHLMTISTEAEQNFIIQFLDRRLSYFLGLRDENAKGQWRWVDQTPFNPRRVFWHKNEPDNSQGENCVVLVYNQDKWAWNDVPCNFEASRICKIPGTTLN

SEQ ID NO: 586 - DNA, 1181 bp, Homo Sapiens
gcgcgcgcaggccggcgggggcgcgccgcgctgcgaggcctgcgcgccaggctgcgggagccatgcggcgatcgaggagctctgcggccgccaagctgcgcgggcagaagcggtccggggcctccgcggcccccgcggcctccgcggccgctgccttggcacccagcgccacccgcacacggcgctccgctagccaggccgggagcaagagccaggcggtggagaagccgccgtcggagaagccgcggctgaggcgctcgtcgccgcgggcccaggaggagggcccgggggagccgccgccgcctgagctggcgttgctcccgccaccgccgccgccgccgccgactcccgcgaccccgacgtcctcggcgtccaacctggacctgggcgagcagcgggagcgctgggagacgttccagaagcggcagaagcttacctccgagggtgccgccaagctcctgctagacacctttgaataccagggcctggtgaagcacacaggaggctgccactgtggagcagttcgttttgaagtttgggcctcagcagacttgcatatatttgactgcaattgcagcatttgcaagaagaagcagaatagacacttcattgttccagcttctcgcttcaagctcctgaagggagctgagcacataacgacttacacgttcaatactcacaaagcccagcataccttctgtaagagatgtggcgttcagagcttctatactccacgatcaaaccccggaggcttcggaattgccccccactgcctggatgagggcactgtgcggagtatggtcactgaggaattcaatggcagcgattgggagaaggccatgaaagagcacaagaccatcaagaacatgtctaaagagtgagcttctgcctctcctgccctgaaaaggaggaatgattggggccagcaactttgctctccctgccgtgcctcggtggtgctcctgaatgtggctgacctgggctgctggttccgttgactagggtcatcttgatctctgcagtttgctccagctaccagtttctttaggcagctctttgtcctccctctgcccagattttgatgtagtctaattgacatccttctcttcccaacttttgtgtgatcttttaggaaaaaaaataaatatttttaacattaaagcaaaaaaaaaaaaaaaaaa

SEQ ID NO: 587 - protein, 272 aa, Homo Sapiens
MRRSRSSAAAKLRGQKRSGASAAPAASAAAALAPSATRTRRSASQAGSKSQAVEKPPSEKPRLRRSSPRAQEEGPGEPPPPELALLPPPPPPPPTPATPTSSASNLDLGEQRERWETFQKRQKLTSEGAAKLLLDTFEYQGLVKHTGGCHCGAVRFEVWASADLHIFDCNCSICKKKQNRHFIVPASRFKLLKGAEHITTYTFNTHKAQHTFCKRCGVQSFYTPRSNPGGFGIAPHCLDEGTVRSMVTEEFNGSDWEKAMKEHKTIKNMSKE

SEQ ID NO: 588 - DNA, 1211 bp, Homo Sapiens
ctgggctccgtgccgctctgtttgccaaccgtccagtcccgcctaccagtgccgggcgctccccacccctcccccggctcccccggtgtccgccatggccaaagcctacgaccacctcttcaagttgctgctgatcggggactcgggggtgggcaagacttgtctgatcattcgctttgcagaggacaacttcaacaacacttacatctccaccatcggaattgatttcaagatccgcactgtggatatagaggggaagaagatcaaactacaagtctgggacacggctggccaagagcggttcaagacaataactactgcctactaccgtggagccatgggcattatcctagtatacgacatcacggatgagaaatctttcgagaatattcagaactggatgaaaagcatcaaggagaatgcctcggctggggtggagcgcctcttgctggggaacaaatgtgacatggaggccaagaggaaggtgcagaaggagcaggccgataagttggctcgagagcatggaatccgatttttcgaaactagtgctaaatccagtatgaatgtggatgaggcttttagttccctggcccgggacatcttgctcaagtcaggaggccggagatcaggaaacggcaacaagcctcccagtactgacctgaaaacttgtgacaagaagaacaccaacaagtgctccctgggctgaggaccctttcttgcctccccaccccggaagctgaacctgagggagacaacggcagagggagtgagcaggggagaaatagcagaggggcttggagggtcacataggtagatggtaaagagaatgaggagaaaaaggagaaaagggaaaagcagaaaggaaaaaaaggaagagagaggaagggagaagggagaggaatgaattgaggaagtgaaagaaggcaaggaggtaggaagagagggaggaggaaaggaaggagagatgcctcaggcttcagaccttacctgggttttcagggcaaacataaatgtaaatacactgatttattctgttactagatcaggttttagggtcctgcaaaaggctagctcggcactacactagggaatttgctcctgttctgtcacttgtcatggtctttcttggtattaaaggccaccatttgcacaaaaaaaaaaaaaaaaaaaaaaaaaaaaaaaaaaaaaaaaaaaaaaaaaaaaaaaaaaaa

SEQ ID NO: 589 - protein, 203 aa, Homo Sapiens
MAKAYDHLFKLLLIGDSGVGKTCLIIRFAEDNFNNTYISTIGIDFKIRTVDIEGKKIKLQVWDTAGQERFKTITTAYYRGAMGIILVYDITDEKSFENIQNWMKSIKENASAGVERLLLGNKCDMEAKRKVQKEQADKLAREHGIRFFETSAKSSMNVDEAFSSLARDILLKSGGRRSGNGNKPPSTDLKTCDKKNTNKCSLG

SEQ ID NO: 590 - DNA, 1852 bp, Homo Sapiens
caggagagaaggcaccgcccccaccccgcctccaaagctaaccctcgggcttgaggggaagaggctgactgtacgttccttctactctggcaccactctccaggctgccatggggcccagcacccctctcctcatcttgttccttttgtcatggtcgggacccctccaaggacagcagcaccaccttgtggagtacatggaacgccgactagctgctttagaggaacggctggcccagtgccaggaccagagtagtcggcatgctgctgagctgcgggacttcaagaacaagatgctgccactgctggaggtggcagagaaggagcgggaggcactcagaactgaggccgacaccatctccgggagagtggatcgtctggagcgggaggtagactatctggagacccagaacccagctctgccctgtgtagagtttgatgagaaggtgactggaggccctgggaccaaaggcaagggaagaaggaatgagaagtacgatatggtgacagactgtggctacacaatctctcaagtgagatcaatgaagattctgaagcgatttggtggcccagctggtctatggaccaaggatccactggggcaaacagagaagatctacgtgttagatgggacacagaatgacacagcctttgtcttcccaaggctgcgtgacttcacccttgccatggctgcccggaaagcttcccgagtccgggtgcccttcccctgggtaggcacagggcagctggtatatggtggctttctttattttgctcggaggcctcctggaagacctggtggaggtggtgagatggagaacactttgcagctaatcaaattccacctggcaaaccgaacagtggtggacagctcagtattcccagcagaggggctgatccccccctacggcttgacagcagacacctacatcgacctggcagctgatgaggaaggtctttgggctgtctatgccacccgggaggatgacaggcacttgtgtctggccaagttagatccacagacactggacacagagcagcagtgggacacaccatgtcccagagagaatgctgaggctgcctttgtcatctgtgggaccctctatgtcgtctataacacccgtcctgccagtcgggcccgcatccagtgctcctttgatgccagcggcaccctgacccctgaacgggcagcactcccttattttccccgcagatatggtgcccatgccagcctccgctataacccccgagaacgccagctctatgcctgggatgatggctaccagattgtctataagctggagatgaggaagaaagaggaggaggtttgaggagctagccttgttttttgcatctttctcactcccatacatttatattatatccccactaaatttcttgttcctcattcttcaaatgtgggccagttgtggctcaaatcctctatatttttagccaatggcaatcaaattctttcagctcctttgtttcatacggaactccagatcctgagtaatccttttagagcccgaagagtcaaaaccctcaatgttccctcctgctctcctgccccatgtcaacaaatttcaggctaaggatgccccagacccagggctctaaccttgtatgcgggcaggcccagggagcaggcagcagtgttcttcccctcagagtgacttggggagggagaaataggaggagacgtccagctctgtcctctcttcctcactcctcccttcagtgtcctgaggaacaggactttctccacattgttttgtattgcaacattttgcattaaaaggaaaatccactgctaaaaaaaaaaaaaaaaaaaaaaaaaaaaaaaaaaaaaa

SEQ ID NO: 591 - protein, 406 aa, Homo Sapiens
MGPSTPLLILFLLSWSGPLQGQQHHLVEYMERRLAALEERLAQCQDQSSRHAAELRDFKNKMLPLLEVAEKEREALRTEADTISGRVDRLEREVDYLETQNPALPCVEFDEKVTGGPGTKGKGRRNEKYDMVTDCGYTISQVRSMKILKRFGGPAGLWTKDPLGQTEKIYVLDGTQNDTAFVFPRLRDFTLAMAARKASRVRVPFPWVGTGQLVYGGFLYFARRPPGRPGGGGEMENTLQLIKFHLANRTVVDSSVFPAEGLIPPYGLTADTYIDLAADEEGLWAVYATREDDRHLCLAKLDPQTLDTEQQWDTPCPRENAEAAFVICGTLYVVYNTRPASRARIQCSFDASGTLTPERAALPYFPRRYGAHASLRYNPRERQLYAWDDGYQIVYKLEMRKKEEEV

SEQ ID NO: 592 - DNA, 1518 bp, Homo Sapiens
cagagagaagaagaaatatttccaaatataccaggctgatctttcgtagtttctcagtcttgctgtctgttgttgtttgaaatctgtttcccacgagactctgggaagatggaggtgcagggcttgggtaacagctgccttcctcagggctgggtacctgctctccgagtctgtgtctccaggctgtgtgctcagacttgaccatgtttgggcatggaggcttgccccagatggggaccaaaagctgcttccctggagacgggcggggaggccaaacttcctgctgaagctctgtggcctcttttggggtgggggcgggggtccaggcagaaagaaactgtctgctgctcaagacccacaggacgccgggaagactaaatgatcactgcccccagtgaatatggtgaagaagctggtgatggcccagaagcggggagagacacgagccctttgcctgggtgtaaccatggtggtgtgtgccgtcatcacctactacatcctggtcacgactgtgctgcccctctaccagaaaagcgtgtggacccaggaatccaagtgccacctgattgagaccaacatcagggaccaggaggagctgaagggcaagaaggtgccccagtacccatgcctgtgggtcaacgtgtcagctgccggcaggtgggctgtgctgtaccacacggaggacactcgggaccagaaccagcagtgctcctacatcccaggcagcgtggacaattaccagacggcccgggccgacgtggagaaggtcagagccaaattccaagagcagcaggtcttctactgcttctccgcacctcgggggaacgaaaccagcgtcctattccagcgcctctacgggccccaggccctcctcttctccctcttctggcccaccttcctgctgaccggtggcctcctcattatcgccatggtgaagagcaaccagtacctgtccatcctggcggcccagaagtagagccatccatccatgccataccacttgtcagggcacaggggactggctgggcccccagggctgctccccacttgcagcacaatgccttctccacctgccctcccactcttccagtccaatccacgctgtcttctgttgcaggactaacctttgagaaatccttttgtgaagtcattgcctgctcaagaatgtacagtggctccccaatgccttggaggccataaggccagccagttctagctctctattacctgtccccactcaactgactcatacctgtttccggctgcatcactatgtgccccacagagaacgatgatcgtcacctctgtgcctgagttctccctgttgtctcaaagcggtacccatcctcccccagaagctgtccccagcgagcctcccttctttgtttgaattctctaataagagcaacagcagctcccatttctagaacacatttacagtattactattttctaggatataaagtgccatatatatttttaattccaatattaataaatgtatgccaaacaacaata

SEQ ID NO: 593 - protein, 191 aa, Homo Sapiens
MVKKLVMAQKRGETRALCLGVTMVVCAVITYYILVTTVLPLYQKSVWTQESKCHLIETNIRDQEELKGKKVPQYPCLWVNVSAAGRWAVLYHTEDTRDQNQQCSYIPGSVDNYQTARADVEKVRAKFQEQQVFYCFSAPRGNETSVLFQRLYGPQALLFSLFWPTFLLTGGLLIIAMVKSNQYLSILAAQK

SEQ ID NO: 594 - DNA, 1334 bp, Homo Sapiens
aatcattagagcctgagtcactctccccaggagacccagacctagaactacccagagcaagaccacagctggtgaacagtccaggagcagacaagatggagacaaattcctctctccccacgaacatctctggagggacacctgctgtatctgctggctatctcttcctggatatcatcacttatctggtatttgcagtcacctttgtcctcggggtcctgggcaacgggcttgtgatctgggtggctggattccggatgacacacacagtcaccaccatcagttacctgaacctggccgtggctgacttctgtttcacctccactttgccattcttcatggtcaggaaggccatgggaggacattggcctttcggctggttcctgtgcaaattcgtctttaccatagtggacatcaacttgttcggaagtgtcttcctgatcgccctcattgctctggaccgctgtgtttgcgtcctgcatccagtctggacccagaaccaccgcaccgtgagcctggccaagaaggtgatcattgggccctgggtgatggctctgctcctcacattgccagttatcattcgtgtgactacagtacctggtaaaacggggacagtagcctgcacttttaacttttcgccctggaccaacgaccctaaagagaggataaatgtggccgttgccatgttgacggtgagaggcatcatccggttcatcattggcttcagcgcacccatgtccatcgttgctgtcagttatgggcttattgccaccaagatccacaagcaaggcttgattaagtccagtcgtcccttacgggtcctctcctttgtcgcagcagccttttttctctgctggtccccatatcaggtggtggcccttatagccacagtcagaatccgtgagttattgcaaggcatgtacaaagaaattggtattgcagtggatgtgacaagtgccctggccttcttcaacagctgcctcaaccccatgctctatgtcttcatgggccaggacttccgggagaggctgatccacgcccttcccgccagtctggagagggccctgaccgaggactcaacccaaaccagtgacacagctaccaattctactttaccttctgcagaggtggagttacaggcaaagtgaggagggagctgggggacactttcgagctcccagctccagcttcgtctcaccttgagttaggctgagccacaggcatttcctgcttattttaggattacccactcatcagaaaaaaaaaaaaaagcctttgtgtcccctgatttggggagaataaacagatatgagtttaaaaaaaaaaaaaaaaaa

SEQ ID NO: 595 - protein, 350 aa, Homo Sapiens
METNSSLPTNISGGTPAVSAGYLFLDIITYLVFAVTFVLGVLGNGLVIWVAGFRMTHTVTTISYLNLAVADFCFTSTLPFFMVRKAMGGHWPFGWFLCKFVFTIVDINLFGSVFLIALIALDRCVCVLHPVWTQNHRTVSLAKKVIIGPWVMALLLTLPVIIRVTTVPGKTGTVACTFNFSPWTNDPKERINVAVAMLTVRGIIRFIIGFSAPMSIVAVSYGLIATKIHKQGLIKSSRPLRVLSFVAAAFFLCWSPYQVVALIATVRIRELLQGMYKEIGIAVDVTSALAFFNSCLNPMLYVFMGQDFRERLIHALPASLERALTEDSTQTSDTATNSTLPSAEVELQAK

SEQ ID NO: 596 - DNA, 18090 bp, Homo Sapiens
gtcgagtcgccctcgcctcgcccgcaccatgatcgccgcggctttcctcgtcttgctgagaccctacagcatccaatgtgccctcttcctcttgttgcttctgctgggcaccatcgccaccatcgtcttcttctgctgctggcaccgcaagctccagaaagggaggcatccgatgaaatcggtcttctcgggtcgttcaagaagccgagatgctgttttgagatcgcaccactttcgttctgagggattcagagcaagccctcggcatcttagaagacgagttgcagcggccgcagctgcccgtctggaagaagtgaagcccgtggtggaagttcaccatcagagtgagcaagaaacttcagtgaggaaacgaagaatcaagaagagcagccgagtccagccagaattttatcactctgttcaaggtgcttcaatcaggaggcctagttccgggaacgcgtcctatcgctgctctatgtcttcctctgcggatttttccgatgaggatgatttcagccagaaatctggctccgcatccccagctccgggagacaccttaccctggaatttgcctaaacatgagagatcgaaaagaaagattcaagggggctcagtgctggaccctgccgagagggcagtgcttcggatagcagatgaacgggacaaagttcagaagaaaacatttacaaaatggataaatcagcatctcatgaaggttcgaaaacatgtgaatgatctctatgaagacttaagggatggacacaatttgatttctcttttagaggttctttcaggagataccttgcccagagaaaaaggtcggatgcgttttcacagactacagaatgtacaaattgcacttgactatttgaaaagacgccaggtgaaattagtgaatattagaaatgatgacataacagatggaaatcccaaattgactttgggattaatctggacaataattttgcactttcagatatctgatatccatgttactggagagtcagaggatatgtctgcaaaagagagattgctactctggacgcagcaggcaacagagggttatgctggaattcggtgtgaaaatttcactacctgctggagagatggaaaattatttaatgccatcattcataaatacaggccggacctgatagatatgaatactgttgctgttcaaagcaaccttgcaaatttagagcatgctttttacgtagcagaaaaaattggtgttataagacttctggaccctgaagatgtcgatgtctcctcacctgatgaaaaatcagtaataacttacgtgtcatctctctatgatgcatttcctaaagtccctgaaggtggggaaggcattggtgcaaatgatgttgaagtcaaatggattgaataccagaatatggtgaactacctcatccaatggattagacaccatgtgaccacaatgtctgagagaacatttcctaataatcctgtagaactgaaggcactttataatcagtatttacagtttaaagaaacagaaattccaccaaaggagacagaaaaatcaaaaattaaacgtctatataaattattagagatttggatagaatttggacgcatcaagctccttcaaggttatcatccaaatgacatagaaaaagagtgggggaaactcattattgccatgctagagagagagaaggcccttcgtccagaagtagaaaggttagaaatgttgcaacagattgccaacagagttcagagggacagtgtcatctgtgaagacaaactgattcttgctggaaatgctcttcagtctgattctaaaagattagaatcaggagtgcagtttcagaatgaagcagaaattgctgggtatatacttgaatgtgagaaccttttacgccagcatgtaattgatgtacagattcttattgatggaaaatactaccaggcagatcaattggtacagagggttgcaaaactgcgtgacgaaattatggccttaaggaacgaatgttcttctgtgtacagcaaaggacgcatactgacaacagaacagacaaagctcatgatatcaggaatcactcaaagtttaaactcaggatttgcacagaccttacaccctagtctgacctcagggctgacccagagtttaacaccttccctaacctcttctagtatgacttctggcctgtcatcagggatgacttcccgcctgactccatctgtcactccagcttatacacctggtttcccatcaggattagttccaaatttcagttcaggagtagagccaaattcattgcaaactttgaagttgatgcagatccgaaaaccccttctaaagtcttctttgctggatcaaaatttaacagaagaagaaatcaatatgaaatttgttcaggatcttttgaattgggttgatgagatgcaggtacaactggaccgcactgagtggggctcagatttgccaagtgttgaaagccatttagaaaatcataaaaatgttcatagagctattgaagaatttgaatctagtctcaaagaagctaaaatcagtgagattcaaatgacagcacctcttaaactgacttatgcagaaaagttgcacagattagagagtcagtatgcaaaactcttgaatacatccaggaatcaagaacggcaccttgatacactccataattttgtaagtcgtgcgactaatgaacttatttggttgaatgaaaaagaagaggaggaagttgcttatgactggagtgagagaaacaccaacatagctaggaaaaaagattatcatgctgaattaatgagagaacttgatcaaaaggaagaaaatattaaatcagttcaggagatagcagagcagctacttctagaaaatcatccagcccggttaactattgaggcctacagagcggcaatgcagacgcagtggagctggatcttacagctctgccagtgtgtggagcagcacataaaggagaacacagcgtatttcgagtttttcaatgatgccaaagaagctactgattacttaaggaatctaaaagatgccattcagcggaagtacagctgtgatagatcaagcagcattcacaagctagaagaccttgttcaggaatcaatggaagagaaagaagaacttctgcagtacaaaagcactatagcaaacctaatgggaaaagcaaaaacaataattcaactgaagccaaggaattctgactgtccactcaaaacttctattccgatcaaagctatctgtgactacagacaaattgagataaccatttacaaagacgatgaatgtgttttggcgaataactctcatcgtgctaaatggaaggtcattagtcctactgggaatgaggctatggtcccatctgtgtgcttcaccgttcctccaccaaacaaagaagcggtggaccttgccaacagaattgagcaacagtatcagaatgtcctgactctttggcatgagtctcacataaacatgaagagtgtagtatcctggcattatctcatcaatgaaattgatagaattcgagctagcaatgtggcttcaataaagacaatgctacctggtgaacatcagcaagttctaagtaatctacaatctcgttttgaagattttctggaagatagccaggaatcccaagtcttttcaggctcagatataacacaactggaaaaggaggttaatgtatgtaagcagtattatcaagaacttcttaaatctgcagaaagagaggagcaagaggaatcagtttataatctctacatctctgaagttcgaaacattagacttcggttagagaactgtgaagatcggctgattagacagattcgaactcccctggaaagagatgatttgcatgaaagtgtgttcagaatcacagaacaggagaaactaaagaaagagctggaacgacttaaagatgatttgggaacaatcacaaataagtgtgaggagtttttcagtcaagcagcagcctcttcatcagtccctaccctacgatcagagcttaatgtggtccttcagaacatgaaccaagtctattctatgtcttccacttacatagataagttgaaaactgttaacttggtgttaaaaaacactcaagctgcagaagccctcgtaaaactctatgaaactaaactgtgtgaagaagaagcagttatagctgacaagaataatattgagaatctaataagtactttaaagcaatggagatctgaagtagatgaaaagagacaggtattccatgccttagaggatgagttgcagaaagctaaagccatcagtgatgaaatgtttaaaacgtataaagaacgggaccttgattttgactggcacaaagaaaaagcagatcaattagttgaaaggtggcaaaatgttcatgtgcagattgacaacaggttacgggacttagagggcattggcaaatcactgaagtactacagagacacttaccatcctttagatgattggatccagcaggttgaaactactcagagaaagattcaggaaaatcagcctgaaaatagtaaaaccctagccacacagttgaatcaacagaagatgctggtgtccgaaatagaaatgaaacagagcaaaatggacgagtgtcaaaaatatgcagaacagtactcagctacagtgaaggactatgaattacaaacaatgacctaccgggccatggtagattcacaacaaaaatctccagtgaaacgccgaagaatgcagagttcagcagatctcattattcaagagttcatggacctaaggactcgatatactgccctggtcactctcatgacacaatatattaaatttgctggtgattcattgaagaggctggaagaggaggagaagtcactggaagaagaaaagaaagaacatgttgaaaaagccaaagaattgcaaaaatgggtatcaaatatcagcaagacattgaaagatgcagagaaggctggaaaacctcccttctctaagcaaaagatttccagtgaggaaatatcaaccaagaaggaacaattatcggaagcacttcaaactatacagctttttttggcaaaacatggagacaaaatgacagatgaagaaagaaatgaattggaaaaacaagtgaaaactcttcaggaaagttataatttattattcagtgaatctctgaaacagctacaagaatcacaaacctcaggagatgtaaaggtagaggagaagattgtagcagagcgtcagcaggagtataaagagaaactccaagggatatgtgatcttcttacccaaactgaaaaccgcctaattggtcaccaagaagccttcatgattggagatggcacagttgagttaaagaaatatcagtccaagcaagaggaattacagaaagatatgcaaggaagtgcacaggcattggctgaagtagtgaaaaacacagagaacttcttaaaagagaatggtgaaaagctgtcacaggaagataaggctttgattgaacagaaacttaatgaagctaagataaagtgtgaacagcttaatttaaaagcagaacagtctaaaaaggagctggataaagttgtgacaacagcaatcaaggaagaaactgaaaaggtagcagcagtgaagcagctggaagagagcaaaaccaaaatagaaaaccttttggactggttgtcaaatgttgacaaagactcagaaagggcagggacaaaacacaaacaggtaatcgaacagaacgggacccattttcaagaaggtgatggcaagtcagcaattggagaagaggatgaagttaatggtaacctgttggagactgatgttgatgggcaagttggaaccactcaggagaatctgaatcagcaatatcagaaagttaaggcccaacacgagaagatcatctctcagcaccaagcagtgatcatagccactcagtctgcacaagtgttgcttgagaaacagggtcagtatctctctcctgaagaaaaagagaaactgcaaaagaacatgaaggaactgaaagtgcattatgaaactgcactggctgagtcagagaagaaaatgaagttaactcactctctgcaggaagaattagaaaagtttgatgctgactataccgagtttgagcactggctacagcagtcagaacaagaacttgaaaacctggaggcaggtgcagatgacatcaatggtttaatgaccaaattgaagaggcagaagagtttctcagaagacgttatttctcacaaaggtgacttgagatacatcacaatttctggaaacagagtgttggaagctgccaaatcttgcagcaagagagacggtggcaaggttgatacttctgcaacccacagagaagtgcagcgcaagttggatcatgctactgatcggttcaggtctctctactctaagtgcaatgttcttggaaataatcttaaagatctggtggataaatatcaacactatgaagatgcttcatgtggacttcttgctggactccaggcctgtgaggccacagcgagcaaacacttatctgaacctattgcggtggaccccaaaaatcttcaaaggcaattagaagagaccaaggctttgcaaggacagatatcaagtcagcaggttgctgtagagaaactgaagaaaacggctgaagtgcttttagatgccaggggatctttacttccagccaagaatgatatccagaaaacacttgatgacattgttgggagatatgaggatctgtccaagtctgttaatgaacgaaatgaaaaactccagataaccttgacccgttcactgagtgtgcaggatggcttggatgaaatgctggactggatgggaaatgtggaaagttctctgaaagaacaaggtcaagtgcctttaaactctactgctcttcaggatattatcagtaaaaacattatgttggaacaggatattgcaggtcgtcagagcagtataaatgccatgaatgaaaaagtgaagaaatttatggaaacaacagatccatccactgcatcctcactgcaagccaaaatgaaagacttgtctgctcggttttcagaagcaagtcataaacacaaagaaactcttgccaaaatggaggagctaaaaaccaaagtagaactgtttgagaacctctcagaaaagctccagacatttttagaaacaaaaactcaggctcttactgaagtagatgtgccaggaaaagatgttactgaattgtctcagtatatgcaggaatcaacttctgaatttttagaacacaagaaacatcttgaagttttgcatagtctcttgaaggagatatccagccatggcttaccaagtgataaggctttggtccttgaaaaaacaaataatttgtcaaagaaattcaaggaaatggaggataccatcaaagaaaaaaaagaagctgtaacttcttgtcaagaacagttggatgctttccaagttcttgttaaatcattgaagtcatggataaaagaaacaacaaaaaaagttcccattgtacagccttcttttggtgcagaggatttaggaaaatctttggaagacactaagaaattacaagaaaagtggagtttaaaaacaccagagattcagaaagtaaacaacagtgggatctcactatgtaacttaataagtgctgtgaccacccctgcaaaggcaatagcagcagttaaatcaggtggagcagtattaaatggtgaaggaacagccacaaatactgaggaattttgggcaaataaaggtttaacatccattaaaaaggacatgactgacataagtcatggttatgaagatcttggcctcttactcaaggacaaaatagcggaactgaacactaaactctccaaattgcaaaaggctcaggaagaatcaagtgcaatgatgcagtggttacagaaaatgaacaaaactgcaacaaaatggcagcagacacctgcacctacagatactgaagctgtgaagactcaagttgagcagaataagtcgtttgaggcagaactgaagcagaatgtaaacaaagtacaggagttgaaagacaaattgacagagctgttggaggagaacccagatactcctgaggcccccagatggaaacagatgttgacagaaatagattctaagtggcaagaactcaatcaattaacaattgatagacaacaaaaactggaagaatcctccaataatctaacccagttccagactgtagaggcccaattgaaacagtggcttgtggaaaaagaacttatggtcagtgttcttgggcccttgtcaattgacccaaatatgctaaacacacaaaggcagcaggtgcagattttgctgcaagaattcgccactcggaaacctcaatatgaacagctgacagcagctggtcagggcattctgagcaggcctggagaagacccttctttacgtgggattgtgaaagagcaactggcagctgtgacccaaaaatgggatagcctaacagggcaattgagtgacagatgtgactggattgaccaagccattgttaaaagcacacagtatcaaagcctgctgagaagcctttctgataaactgagtgacttggataataaactcagcagcagtctggctgtgagcacgcaccctgatgctatgaaccaacagttggaaacagcccaaaaaatgaagcaggagatacagcaggaaaagaagcagataaaagtggcccaggcactctgtgaggatttgtcagcactggttaaagaagagtacttgaaagcagaacttagtaggcaactagaaggcatcttaaaatcatttaaggatgttgaacagaaagcagagaatcatgtccagcaccttcagtcggcctgtgcaagctctcatcaatttcagcaaatgtctagagattttcaggcttggctggatacaaagaaagaagagcaaaacaaatctcatccaatatctgccaaactcgatgtcttggagtcattaattaaagatcataaagactttagtaaaactttgaccgctcagtctcatatgtatgaaaaaaccattgcagaaggtgaaaatctgttattaaaaacacaagggtctgagaaggcagccttacagttacagcttaatacaattaaaaccaattgggatacatttaataagcaggtgaaagaaagagaaaacaagttaaaagagtcattggaaaaagcccttaagtataaagagcaagtagagactctctggccatggatagacaaatgccaaaacaacctggaggaaataaaattttgcttggatcctgctgaaggagagaattctattgccaagttaaagtctctgcagaaggaaatggaccaacactttggtatggtagaattactgaacaacacagccaatagcttgctcagtgtctgtgagatagataaagaagttgttacagatgagaataagtcactgatccagaaggtggacatggtcactgaacaacttcacagtaagaaattctgtctggagaacatgactcagaagtttaaagaatttcaagaagtttccaaagaatctaaaaggcagcttcagtgtgcaaaggagcagctagatatccatgattcgctgggatcccaggcttacagtaacaaatacctgaccatgttgcaaactcagcagaaatcacttcaggccttgaagcatcaggtagatttggctaaaagacttgcacaggaccttgtggtagaggcctcagactcaaagggaacctctgatgttttattacaagtggaaaccatagctcaagagcatagtacactaagtcagcaggttgatgaaaagtgttctttcttagaaaccaagcttcagggcattgggcatttccagaataccattcgagaaatgttttctcagttcgcagagtttgatgatgaactggatagcatggctccagtggggagagatgcagaaacattgcaaaagcaaaaggaaactataaaagcctttctaaagaaactagaagccctcatggcaagcaatgacaatgccaataaaacctgcaagatgatgttagccacagaagaaacctctcctgaccttgttggaatcaaaagggacttggaggccttaagcaaacaatgcaacaagttactggaccgagcccaagccagagaagagcaggttgaagggacaattaagcgccttgaagaattttacagcaaattgaaagaattttctattctgctccagaaagccgaagaacatgaagagtcacaaggtcctgttggtatggaaacggagacaattaatcagcagcttaacatgttcaaggtattccagaaagaagagattgaacccttgcaaggtaaacagcaagatgtaaactggttaggtcaaggccttattcagagtgctgccaaaagcactagcactcagggcttggagcatgacctggatgatgtcaatgcacggtggaagactctcaataagaaggtggctcagcgagcagcccagctgcaggaggccttgctgcactgtgggaggttccaggatgccctggagtccctgctcagctggatggtggacactgaggagcttgtggccaatcagaagcccccgtcggctgagttcaaagtggtaaaggcccagatacaagaacaaaagcttctccagagattgttggatgaccgaaaatctacggtggaggtaatcaaacgagaaggagaaaaaattgctacaacagcagagcccgcagataaagtgaagattttgaaacagctcagtctcttggatagcagatgggaggcattgcttaataaagctgaaacaaggaatcgtcagttggaaggtatctcggtggtagcacagcaatttcatgaaaccttagaaccactgaacgagtggcttacaaccatagaaaagaggctggtgaattgtgaacccataggaacccaagcatctaaacttgaggaacaaattgcacagcacaaagccttagaagatgacatcatcaatcacaataaacatttacaccaggctgttagcattggccagtccttaaaggttttgagctccagggaggataaagatatggtgcagagtaaattagacttctctcaagtatggtacattgagattcaagagaaaagtcacagcaggtctgagctcctccagcaggccttatgtaatgctaagatttttggggaagatgaagttgaactgatgaactggctgaatgaagtgcatgacaaactgagcaagctctcagtccaggattacagcactgaggggctatggaagcagcagtctgaacttcgggttctgcaagaggacatcttactcaggaaacaaaatgtagatcaggctttactaaatggtttagaactacttaaacaaaccacaggtgatgaagttttaataattcaagataaattggaagccattaaagcaaggtacaaagacattactaaactgagcactgatgtggccaagactctggaacaggcgctgcagcttgcaaggcggctgcactccacacacgaagagctgtgtacctggctggacaaagtggaggtggaattactttcatatgaaactcaggttctgaaaggagaagaagcaagtcaagcacaaatgagaccaaaggaactgaaaaaggaagctaagaacaacaaagccttactggactcccttaatgaagtgagcagtgctttgctggaactggtaccatggagggcaagagaaggacttgagaaaatggtagctgaggacaatgagcgctaccgattagtgagcgacaccatcactcagaaggtggaggagatcgatgcagccattctgcgatcacagcagtttgaccaagcagctgatgctgagttatcctggattactgaaacagaaaaaaaattgatgtctctgggtgacatcaggcttgagcaagaccagacttctgctcagcttcaagttcaaaagacattcaccatggagattttgagacacaaggatattattgatgaccttgttaaatctgggcataaaatcatgaccgcatgcagtgaagaggaaaagcaatcaatgaagaaaaaactggacaaggtactgaagaactatgataccatctgccagattaattcagaaaggtatctgcagctggaacgggcacagtccctggttaaccaattctgggaaacatatgaagaactttggccatggctgacagaaacacaatcaatcatctctcagcttcccgccccagcccttgaatatgaaactctaaggcagcagcaggaagaacatcggcaactgcgtgagttgatagctgaacacaagcctcatatagataagatgaacaaaactgggccacagttactggaattgagccctggggaaggcttttctatccaagagaagtatgtggcagccgacaccctttacagtcaaattaaagaagatgtcaaaaagcgtgctgtggcactggatgaagccatttctcaatcaactcagttccatgacaagatagatcagatccttgagagcctggaacgcatcgtggaacgtctgaggcagccaccctctatctctgcagaggttgagaagatcaaggaacagatcagtgaaaataagaatgtgtcagtagacatggaaaagctacagccgttgtatgaaactcttaaacagaggggagaggaaatgattgctagatctggggggactgataaagacatatctgccaaagctgttcaggataagcttgaccaaatggttttcatttgggagaacatacacacactggtggaagagagggaagccaaactactggatgtgatggagctagcagaaaagttctggtgtgatcacatgtcattgatagttaccattaaagatactcaagatttcatccgggacctggaagatcctggaattgatccttcagtagtaaaacaacagcaagaagcagcagagaccataagggaagaaatagatggactacaggaggagctggatatagttattaacctaggttctgaactcattgcggcatgtggggagcctgataaacccattgtcaagaagagtatagatgagttaaattcagcatgggattctctaaataaagcttggaaagaccggattgacaaacttgaggaggcaatgcaggctgccgttcagtaccaggatggactgcaggcggtatttgactgggtagatattgcaggtggtaaattagcttcaatgtctccaattggaacagatctcgaaactgtcaagcagcagattgaagagctaaagcaatttaagtctgaggcctatcaacagcagatagaaatggaaagactgaatcatcaagcagagcttttgctaaagaaagtaacagaagagagtgacaaacacactgttcaagacccattaatggaactgaaattgatatgggatagcctggaggagagaatcatcaacagacagcataaactggagggtgctctattagccttgggtcagttccaacatgccctggatgagctcctggcatggctgacacacaccgagggcttgctaagtgagcagaaacctgttggaggagaccctaaagccattgaaattgaacttgccaagcatcatgtgctccaaaatgatgtattagcccatcagtccacagtggaagccgttaataaagcaggaaatgatctaattgaatcaagtgcaggagaagaagcaagcaaccttcagaacaagctagaggttttaaatcaacgctggcaaaatgttttggaaaaaacagaacaaaggaagcagcagctggatggtgccttgcgccaggccaaagggttccatggcgaaattgaggatttgcagcagtggctgactgacacggagcgtcatctgttggcatctaaaccgctgggaggtttaccggaaacagccaaggagcagcttaatgtccatatggaagtctgtgctgcctttgaagctaaagaagaaacatataagagtctgatgcagaaaggccagcagatgcttgcaagatgcccaaaatctgcagagacaaatattgaccaagacataaataacttgaaagaaaaatgggaatcggtggaaaccaaactcaatgaaaggaaaactaaactggaagaggctctcaacttggcaatggagttccacaattctctccaagacttcatcaactggcttactcaggctgaacagaccctaaatgtagcttctcggccaagtctcatcttggacacagtcttatttcaaattgacgaacacaaggtttttgccaatgaagtaaattctcatcgtgagcagataatagagctggacaaaactggaacccacctaaaatattttagtcagaaacaagatgttgttctaatcaagaatctacttatcagtgtacaaagtcgatgggaaaaagtggttcaacggttggtagagagaggaagatctttggatgatgcaaggaagagagccaagcagttccatgaagcttggagtaaacttatggagtggctagaagagtcagaaaagtctttggattctgaactggaaatcgcaaatgatccagacaaaataaaaacacaacttgcacaacataaggagtttcagaaatcactcggagccaagcattctgtctacgacaccaccaacaggactggacgttctctgaaggagaaaacctccctggctgatgacaacctgaaactggatgacatgctgagtgaactcagagacaaatgggataccatatgtggaaaatctgtggaaagacaaaacaaattggaggaagccctgttattttctggacaattcacagatgccctacaggctctcattgattggttatatagagttgaaccccagctggcagaagaccagcctgttcatggagacattgatttggtgatgaatctgatcgataatcacaaggccttccaaaaagagttggggaagaggaccagcagtgtgcaggccctgaagcgctcagcccgagaactcatagaaggcagtcgggatgactcctcctgggtcaaggtccagatgcaggaattaagcacacgctgggagaccgtgtgtgcactttctatatcaaagcaaacacggttagaagcagccctgcgtcaggcagaggaattccactcggtggtacatgccctcttggagtggctggctgaggcggagcaaaccctgcgtttccatggtgtcctcccagatgatgaggatgctctccggactctcattgatcagcataaagaattcatgaagaaactggaagaaaagagagctgaactaaataaagccaccactatgggcgacaccgttttggctatctgccaccccgactccatcactaccattaagcactggataacaatcatccgggcgaggtttgaggaggtgctggcctgggcaaagcaacatcagcagagattagcaagtgctctggctgggcttattgccaaacaggaattgttggaagctttgctggcttggttgcaatgggctgaaactacacttactgataaggataaagaagtcatcccccaggagatcgaagaggtgaaagcactcattgcagaacaccagaccttcatggaggaaatgaccagaaaacagcctgatgttgataaagtaacgaagacctataagaggagagctgctgatccttcctcattacaatcccatattccagtcttggataagggacgagcaggaagaaaacgctttccagcatcaagcttgtatccctctgggtcacagacacaaattgaaaccaaaaatcctagggtaaacttactggtgagcaaatggcagcaagtctggctcctggcgttggaaagaaggaggaaactcaatgatgccttggacagactagaggagctgagggaatttgctaactttgattttgatatctggcgcaaaaaatacatgcgatggatgaatcacaagaaatctcgagtgatggacttcttcaggagaattgataaagaccaggatgggaaaataacgcggcaggaatttattgatggaattctttcctcaaagtttccaaccagtcgcttggagatgagcgcagttgcagacatctttgacagagatggcgatggatatattgactactatgaatttgtagcagcccttcacccaaataaagatgcatataaacctatcacagatgccgacaaaatcgaagatgaggtgacaaggcaggtagctaagtgtaaatgtgcaaagcgatttcaagttgagcagattggtgataataaatacaggttcttcctgggaaatcagtttggagactcccagcaactgcgactggtccggatcctgcggagtactgtgatggttcgtgttggaggtggatggatggcacttgatgagttcttagtgaaaaatgatccttgcagggccaaaggaaggacaaacatggaactgcgtgagaagttcattttagcagatggtgccagccagggtatggctgctttccgaccccgaggccgaagatcccggccatcatcacgaggcgcttcacccaacagatccacttctgtgtccagtcaggctgcgcaggcggcctccccacaggtccctgccaccaccacacccaagattctccatcctttaacacgcaattatggtaaaccatggttgacaaacagcaaaatgtcaactccttgtaaagcagcagagtgctcagactttcccgtgccatctgcagagggaacgccaatacaaggaagcaagcttcgacttccaggatatttatcagggaaaggcttccactctggggaggacagtggcttgataacaactgcagctgccagagtccgaacacagtttgctgattccaagaagactcccagccgaccaggaagtcgagctggaagcaaagctggcagcagggccagcagccgccgaggcagtgatgcatcagactttgacatttcagaaatccagtccgtgtgctcagatgtggaaactgtcccccagacacacagacctacaccccgagcaggttctcggccatccacagcgaagccttcaaaaatccccacgccccagaggaaatcacctgccagcaaattggacaagtcctcaaagagatagtgcaattggttctaccaaggcccttccttgagcatttattatttaagtttgaacgatgtaaaatatggtgtagaaattcttgtgaaatattgcaagaggcgagtttaaaattctgcagatggccttatttgtgtatttgtctttttattttatctgtataattttttttgtcagatattctggggttaaagtcacatcatatgtgaggaggaaaagtttaacatgaactaacatttctgcactgtaacgtgccgggcacacactaaactcagttactgtacctacaggtaagtctacatcctctctgacagccacagcactacatcaatccctgacgttagggatacctcatgacattttcctgtttttatggaaactctgagaagctgaatgatacatgcaggggatattttttgagatgatttaaatgtaaaccaaaagatggaagacaaaaagacaaacacacccacacgcagtctttgcagtatctgacagagaactcacaggaagttacttcaagcacttgccagtactatgatattcaagtaccttgcagcatttctctgccattgctttcaatgaggccagaggcatcctggatattagacctattatactgtaagaatataagtataaagtgcgttcatatacatgtgaggttttcttttgcttgagtggacagtagcacctgtatcattgaactcattttgtatcagagcaattttgcttgcagaaagctatgaaataaaacacgtcccttaactgcattgctatggaattaattttttttccccagggaaaactagtgtatttttttatgagcaatatcaatttggagtgaccaaaagatacttaaaaatgggtttattttgatttctcatctgaaataatcatgttctggtattatatctatctatatttaataaatatatacattttaatttattatgtgtactcacatactatagaaagatattagtatgcatttaataaaacatattcacttgaatatatggaaaaaaaaaaaaaaaaaa

SEQ ID NO: 597 - protein, 5675 aa, Homo Sapiens
MIAAAFLVLLRPYSIQCALFLLLLLLGTIATIVFFCCWHRKLQKGRHPMKSVFSGRSRSRDAVLRSHHFRSEGFRASPRHLRRRVAAAAAARLEEVKPVVEVHHQSEQETSVRKRRIKKSSRVQPEFYHSVQGASIRRPSSGNASYRCSMSSSADFSDEDDFSQKSGSASPAPGDTLPWNLPKHERSKRKIQGGSVLDPAERAVLRIADERDKVQKKTFTKWINQHLMKVRKHVNDLYEDLRDGHNLISLLEVLSGDTLPREKGRMRFHRLQNVQIALDYLKRRQVKLVNIRNDDITDGNPKLTLGLIWTIILHFQISDIHVTGESEDMSAKERLLLWTQQATEGYAGIRCENFTTCWRDGKLFNAIIHKYRPDLIDMNTVAVQSNLANLEHAFYVAEKIGVIRLLDPEDVDVSSPDEKSVITYVSSLYDAFPKVPEGGEGIGANDVEVKWIEYQNMVNYLIQWIRHHVTTMSERTFPNNPVELKALYNQYLQFKETEIPPKETEKSKIKRLYKLLEIWIEFGRIKLLQGYHPNDIEKEWGKLIIAMLEREKALRPEVERLEMLQQIANRVQRDSVICEDKLILAGNALQSDSKRLESGVQFQNEAEIAGYILECENLLRQHVIDVQILIDGKYYQADQLVQRVAKLRDEIMALRNECSSVYSKGRILTTEQTKLMISGITQSLNSGFAQTLHPSLTSGLTQSLTPSLTSSSMTSGLSSGMTSRLTPSVTPAYTPGFPSGLVPNFSSGVEPNSLQTLKLMQIRKPLLKSSLLDQNLTEEEINMKFVQDLLNWVDEMQVQLDRTEWGSDLPSVESHLENHKNVHRAIEEFESSLKEAKISEIQMTAPLKLTYAEKLHRLESQYAKLLNTSRNQERHLDTLHNFVSRATNELIWLNEKEEEEVAYDWSERNTNIARKKDYHAELMRELDQKEENIKSVQEIAEQLLLENHPARLTIEAYRAAMQTQWSWILQLCQCVEQHIKENTAYFEFFNDAKEATDYLRNLKDAIQRKYSCDRSSSIHKLEDLVQESMEEKEELLQYKSTIANLMGKAKTIIQLKPRNSDCPLKTSIPIKAICDYRQIEITIYKDDECVLANNSHRAKWKVISPTGNEAMVPSVCFTVPPPNKEAVDLANRIEQQYQNVLTLWHESHINMKSVVSWHYLINEIDRIRASNVASIKTMLPGEHQQVLSNLQSRFEDFLEDSQESQVFSGSDITQLEKEVNVCKQYYQELLKSAEREEQEESVYNLYISEVRNIRLRLENCEDRLIRQIRTPLERDDLHESVFRITEQEKLKKELERLKDDLGTITNKCEEFFSQAAASSSVPTLRSELNVVLQNMNQVYSMSSTYIDKLKTVNLVLKNTQAAEALVKLYETKLCEEEAVIADKNNIENLISTLKQWRSEVDEKRQVFHALEDELQKAKAISDEMFKTYKERDLDFDWHKEKADQLVERWQNVHVQIDNRLRDLEGIGKSLKYYRDTYHPLDDWIQQVETTQRKIQENQPENSKTLATQLNQQKMLVSEIEMKQSKMDECQKYAEQYSATVKDYELQTMTYRAMVDSQQKSPVKRRRMQSSADLIIQEFMDLRTRYTALVTLMTQYIKFAGDSLKRLEEEEKSLEEEKKEHVEKAKELQKWVSNISKTLKDAEKAGKPPFSKQKISSEEISTKKEQLSEALQTIQLFLAKHGDKMTDEERNELEKQVKTLQESYNLLFSESLKQLQESQTSGDVKVEEKIVAERQQEYKEKLQGICDLLTQTENRLIGHQEAFMIGDGTVELKKYQSKQEELQKDMQGSAQALAEVVKNTENFLKENGEKLSQEDKALIEQKLNEAKIKCEQLNLKAEQSKKELDKVVTTAIKEETEKVAAVKQLEESKTKIENLLDWLSNVDKDSERAGTKHKQVIEQNGTHFQEGDGKSAIGEEDEVNGNLLETDVDGQVGTTQENLNQQYQKVKAQHEKIISQHQAVIIATQSAQVLLEKQGQYLSPEEKEKLQKNMKELKVHYETALAESEKKMKLTHSLQEELEKFDADYTEFEHWLQQSEQELENLEAGADDINGLMTKLKRQKSFSEDVISHKGDLRYITISGNRVLEAAKSCSKRDGGKVDTSATHREVQRKLDHATDRFRSLYSKCNVLGNNLKDLVDKYQHYEDASCGLLAGLQACEATASKHLSEPIAVDPKNLQRQLEETKALQGQISSQQVAVEKLKKTAEVLLDARGSLLPAKNDIQKTLDDIVGRYEDLSKSVNERNEKLQITLTRSLSVQDGLDEMLDWMGNVESSLKEQGQVPLNSTALQDIISKNIMLEQDIAGRQSSINAMNEKVKKFMETTDPSTASSLQAKMKDLSARFSEASHKHKETLAKMEELKTKVELFENLSEKLQTFLETKTQALTEVDVPGKDVTELSQYMQESTSEFLEHKKHLEVLHSLLKEISSHGLPSDKALVLEKTNNLSKKFKEMEDTIKEKKEAVTSCQEQLDAFQVLVKSLKSWIKETTKKVPIVQPSFGAEDLGKSLEDTKKLQEKWSLKTPEIQKVNNSGISLCNLISAVTTPAKAIAAVKSGGAVLNGEGTATNTEEFWANKGLTSIKKDMTDISHGYEDLGLLLKDKIAELNTKLSKLQKAQEESSAMMQWLQKMNKTATKWQQTPAPTDTEAVKTQVEQNKSFEAELKQNVNKVQELKDKLTELLEENPDTPEAPRWKQMLTEIDSKWQELNQLTIDRQQKLEESSNNLTQFQTVEAQLKQWLVEKELMVSVLGPLSIDPNMLNTQRQQVQILLQEFATRKPQYEQLTAAGQGILSRPGEDPSLRGIVKEQLAAVTQKWDSLTGQLSDRCDWIDQAIVKSTQYQSLLRSLSDKLSDLDNKLSSSLAVSTHPDAMNQQLETAQKMKQEIQQEKKQIKVAQALCEDLSALVKEEYLKAELSRQLEGILKSFKDVEQKAENHVQHLQSACASSHQFQQMSRDFQAWLDTKKEEQNKSHPISAKLDVLESLIKDHKDFSKTLTAQSHMYEKTIAEGENLLLKTQGSEKAALQLQLNTIKTNWDTFNKQVKERENKLKESLEKALKYKEQVETLWPWIDKCQNNLEEIKFCLDPAEGENSIAKLKSLQKEMDQHFGMVELLNNTANSLLSVCEIDKEVVTDENKSLIQKVDMVTEQLHSKKFCLENMTQKFKEFQEVSKESKRQLQCAKEQLDIHDSLGSQAYSNKYLTMLQTQQKSLQALKHQVDLAKRLAQDLVVEASDSKGTSDVLLQVETIAQEHSTLSQQVDEKCSFLETKLQGIGHFQNTIREMFSQFAEFDDELDSMAPVGRDAETLQKQKETIKAFLKKLEALMASNDNANKTCKMMLATEETSPDLVGIKRDLEALSKQCNKLLDRAQAREEQVEGTIKRLEEFYSKLKEFSILLQKAEEHEESQGPVGMETETINQQLNMFKVFQKEEIEPLQGKQQDVNWLGQGLIQSAAKSTSTQGLEHDLDDVNARWKTLNKKVAQRAAQLQEALLHCGRFQDALESLLSWMVDTEELVANQKPPSAEFKVVKAQIQEQKLLQRLLDDRKSTVEVIKREGEKIATTAEPADKVKILKQLSLLDSRWEALLNKAETRNRQLEGISVVAQQFHETLEPLNEWLTTIEKRLVNCEPIGTQASKLEEQIAQHKALEDDIINHNKHLHQAVSIGQSLKVLSSREDKDMVQSKLDFSQVWYIEIQEKSHSRSELLQQALCNAKIFGEDEVELMNWLNEVHDKLSKLSVQDYSTEGLWKQQSELRVLQEDILLRKQNVDQALLNGLELLKQTTGDEVLIIQDKLEAIKARYKDITKLSTDVAKTLEQALQLARRLHSTHEELCTWLDKVEVELLSYETQVLKGEEASQAQMRPKELKKEAKNNKALLDSLNEVSSALLELVPWRAREGLEKMVAEDNERYRLVSDTITQKVEEIDAAILRSQQFDQAADAELSWITETEKKLMSLGDIRLEQDQTSAQLQVQKTFTMEILRHKDIIDDLVKSGHKIMTACSEEEKQSMKKKLDKVLKNYDTICQINSERYLQLERAQSLVNQFWETYEELWPWLTETQSIISQLPAPALEYETLRQQQEEHRQLRELIAEHKPHIDKMNKTGPQLLELSPGEGFSIQEKYVAADTLYSQIKEDVKKRAVALDEAISQSTQFHDKIDQILESLERIVERLRQPPSISAEVEKIKEQISENKNVSVDMEKLQPLYETLKQRGEEMIARSGGTDKDISAKAVQDKLDQMVFIWENIHTLVEEREAKLLDVMELAEKFWCDHMSLIVTIKDTQDFIRDLEDPGIDPSVVKQQQEAAETIREEIDGLQEELDIVINLGSELIAACGEPDKPIVKKSIDELNSAWDSLNKAWKDRIDKLEEAMQAAVQYQDGLQAVFDWVDIAGGKLASMSPIGTDLETVKQQIEELKQFKSEAYQQQIEMERLNHQAELLLKKVTEESDKHTVQDPLMELKLIWDSLEERIINRQHKLEGALLALGQFQHALDELLAWLTHTEGLLSEQKPVGGDPKAIEIELAKHHVLQNDVLAHQSTVEAVNKAGNDLIESSAGEEASNLQNKLEVLNQRWQNVLEKTEQRKQQLDGALRQAKGFHGEIEDLQQWLTDTERHLLASKPLGGLPETAKEQLNVHMEVCAAFEAKEETYKSLMQKGQQMLARCPKSAETNIDQDINNLKEKWESVETKLNERKTKLEEALNLAMEFHNSLQDFINWLTQAEQTLNVASRPSLILDTVLFQIDEHKVFANEVNSHREQIIELDKTGTHLKYFSQKQDVVLIKNLLISVQSRWEKVVQRLVERGRSLDDARKRAKQFHEAWSKLMEWLEESEKSLDSELEIANDPDKIKTQLAQHKEFQKSLGAKHSVYDTTNRTGRSLKEKTSLADDNLKLDDMLSELRDKWDTICGKSVERQNKLEEALLFSGQFTDALQALIDWLYRVEPQLAEDQPVHGDIDLVMNLIDNHKAFQKELGKRTSSVQALKRSARELIEGSRDDSSWVKVQMQELSTRWETVCALSISKQTRLEAALRQAEEFHSVVHALLEWLAEAEQTLRFHGVLPDDEDALRTLIDQHKEFMKKLEEKRAELNKATTMGDTVLAICHPDSITTIKHWITIIRARFEEVLAWAKQHQQRLASALAGLIAKQELLEALLAWLQWAETTLTDKDKEVIPQEIEEVKALIAEHQTFMEEMTRKQPDVDKVTKTYKRRAADPSSLQSHIPVLDKGRAGRKRFPASSLYPSGSQTQIETKNPRVNLLVSKWQQVWLLALERRRKLNDALDRLEELREFANFDFDIWRKKYMRWMNHKKSRVMDFFRRIDKDQDGKITRQEFIDGILSSKFPTSRLEMSAVADIFDRDGDGYIDYYEFVAALHPNKDAYKPITDADKIEDEVTRQVAKCKCAKRFQVEQIGDNKYRFFLGNQFGDSQQLRLVRILRSTVMVRVGGGWMALDEFLVKNDPCRAKGRTNMELREKFILADGASQGMAAFRPRGRRSRPSSRGASPNRSTSVSSQAAQAASPQVPATTTPKILHPLTRNYGKPWLTNSKMSTPCKAAECSDFPVPSAEGTPIQGSKLRLPGYLSGKGFHSGEDSGLITTAAARVRTQFADSKKTPSRPGSRAGSKAGSRASSRRGSDASDFDISEIQSVCSDVETVPQTHRPTPRAGSRPSTAKPSKIPTPQRKSPASKLDKSSKR

SEQ ID NO: 598 - DNA, 3795 bp, Homo Sapiens
gttttctacccaagaatgctacttcaggagatcagtcaaaaggttagggtgatggtgacggtggaaatatagaaaaaggaatttattcaagaggtattcaaaaagaagtgaaatagagatgagttggagatagattggataaaaagagtgagggagagggaggtgtcaggctgcagcccaggttctgagttgccaaagaggagtcttttcctccaggaaattgagacacgccggttgtgaaacctactgaagtgagcggcggcgccaggattcctgggaccccgacctctttgcagctcgcacagctaagggcgagggcgcccttcggcagaagcagcaaaccgccggcaagcccagcgaggagggctgccggggtctgggcttgggaattggctggcacccagcggaaagggacgtgagctgagcggcgggggagaagagtgcgcaggtcagagggcggcgcgcagcggcgctccgcgaggtccccacgccgggcgatatggggtgcctgctgtttctgctgctctgggcgctcctccaggcttggggaagcgctgaagtcccgcaaaggcttttccccctccgctgcctccagatctcgtccttcgccaatagcagctggacgcgcaccgacggcttggcgtggctgggggagctgcagacgcacagctggagcaacgactcggacaccgtccgctctctgaagccttggtcccagggcacgttcagcgaccagcagtgggagacgctgcagcatatatttcgggtttatcgaagcagcttcaccagggacgtgaaggaattcgccaaaatgctacgcttatcctatcccttggagctccaggtgtccgctggctgtgaggtgcaccctgggaacgcctcaaataacttcttccatgtagcatttcaaggaaaagatatcctgagtttccaaggaacttcttgggagccaacccaagaggccccactttgggtaaacttggccattcaagtgctcaaccaggacaagtggacgagggaaacagtgcagtggctccttaatggcacctgcccccaatttgtcagtggcctccttgagtcagggaagtcggaactgaagaagcaagtgaagcccaaggcctggctgtcccgtggccccagtcctggccctggccgtctgctgctggtgtgccatgtctcaggattctacccaaagcctgtatgggtgaagtggatgcggggtgagcaggagcagcagggcactcagccaggggacatcctgcccaatgctgacgagacatggtatctccgagcaaccctggatgtggtggctggggaggcagctggcctgtcctgtcgggtgaagcacagcagtctagagggccaggacatcgtcctctactggggtgggagctacacctccatgggcttgattgccttggcagtcctggcgtgcttgctgttcctcctcattgtgggctttacctcccggtttaagaggcaaacttcctatcagggcgtcctgtgactcgccttgccacatctgtgtctctggaacccaggacctctggacctcaggttcctaagacttcagtcctggtctgctcaggaattgaagatgtaaggaattgaagataggagagataccttgaaaaagtagagaacagtcatgaggcagctttcatcacacccttttaacatttatctaaaagaatttaaattctttttcaaaaattacactacaagtttataagcccaaatggctctgtgaaatcagaagtgcaaaggtgtgcaaacttgtatctgaagacctaccagggacaagcaggtaagagctgatgtgagtgtgtgtgatgggatctgtaaggaactggaacacacatgtcctatccaaaggaatcagctgcagctgcttgttgtcaagtataaagtcaggacctggcttggctttaaccgtttttcaagaaaactggaaatctggattttcagcgaacatgcctgattttaaaaggttgactcaagtttttacaaaatactatgtgggacacctcaaatacatacctactgactgatgacaaacccaggagtttgtgtgtcttttataaaaagtttgccctggatgtcatattggcagttggaggacacagtttctattgtaaatttggatttacgactgaagaaggacattttctctttaaaagaaagttaggttataagaaacagaggcgtctcacatttttacttggtgtaattaataaacgaagataaatcatagtgtatgtgtattatgttgaaaaaaactactctgagtaaggatatttctctcaaatggtcatcactttttttccttggaggaagattgtcatgaaggcatcccttccttcccaaaacgacaacggcaacaacaacagtctcctttacttacagctattaaaagagacaatgtagggaaagggccaacaccacttgggcaagcatgagctgcagcgatgatggtgatggtagcccagccatgctgtgttcttatcttagagaggacagagcaggaaacttacaggggtagcagacctttctgatgccaaagaaataaggaggccaaaatcatgtttgcctagctgggaggtaaatctcttggcagtcagggtccctgaacacccagaaaaaataagtgagacttaacggttggagagtgtttgcttgagaaaagtaacatttcacactctctatactagacttgcacatatgaatttaggatgtgcgtgaagattctgctagcttcaacatatcccaaagcacttggatatgcctataatccaagtgctttgggaggctgagataggaggattgtttaaggccaggcatttgaaatcagcctgggcaacatagtgagaccctgtctctacaaaaaattaaaaaactagccacccatggtggtgagcgcctgtagtcctagctactctggaggctgaggtgggaggatcccttgagcccatgaattccaggttagtgtgagctgtgattgtgtcactacagtgtaaggatgacagagggagaccctgtcttaaaaaaaaattatgctagcttttaaatcaatggttcccaaattgtagtaacctgaccaacagcctcagcaggacctgggaacttgttataaatgcaaattgttttgggcctcatcctatacccgctgaatgagaaactctgagtctggaagcaggctcaatagtcaagccccctggtgattctgatgcttagctaaagttagagaaccactgttcttagacattgtgcaatgttatacaacaacttcctcaaagtgctaagtgaaaaggacattggcctggcgttagtcagggaaggcgtcctggagggaggggaatttgaagcagagctttgaaaaacaaaggcagtgaggtgaaccagcaagtgcactggctgaggggactggagttctagcctctgaaccagtttcctcctgtgccaaaggaggataataattatctattattgattatctcctagacttgtggagttcaagtgtgtaatgccttaaaagatgtggaggctgttgctgtgtttggtaccacattgcccaccctcacgtggcgctcttcagcttaggttcctctagcagtgtcaagtttgtgaaccaaccccactggccttctgcattctgagggcacgtgtgttaaagtctctactgatgtccttttggaaatgcctctgcatgaatttatggtagctctgactcatctttaaacaattttaatttatttagaaaataaaggcttatctctccaggaaaaaaaaaaaaaa

SEQ ID NO: 599 - protein, 335 aa, Homo Sapiens
MGCLLFLLLWALLQAWGSAEVPQRLFPLRCLQISSFANSSWTRTDGLAWLGELQTHSWSNDSDTVRSLKPWSQGTFSDQQWETLQHIFRVYRSSFTRDVKEFAKMLRLSYPLELQVSAGCEVHPGNASNNFFHVAFQGKDILSFQGTSWEPTQEAPLWVNLAIQVLNQDKWTRETVQWLLNGTCPQFVSGLLESGKSELKKQVKPKAWLSRGPSPGPGRLLLVCHVSGFYPKPVWVKWMRGEQEQQGTQPGDILPNADETWYLRATLDVVAGEAAGLSCRVKHSSLEGQDIVLYWGGSYTSMGLIALAVLACLLFLLIVGFTSRFKRQTSYQGVL

SEQ ID NO: 600 - DNA, 6831 bp, Homo Sapiens
ccaggccccattgttcccggtttccagccatggctgccattacctgaccagcgccacagccggtctctctgcaggcgccgggagaagtgaccagagcaatttctgcttttcacagggcgggtttctcaacggtgacttgtgggcagtgccttctgctgagcgagtcatggcccgaaggcagaactaactgtgcctgcagtcttcactctcaggatgcagccgaggtgggcccaaggggccacgatgtggcttggagtcctgctgacccttctgctctgttcaagccttgagggtcaagaaaactctttcacaatcaacagtgttgacatgaagagcctgccggactggacggtgcaaaatgggaagaacctgaccctgcagtgcttcgcggatgtcagcaccacctctcacgtcaagcctcagcaccagatgctgttctataaggatgacgtgctgttttacaacatctcctccatgaagagcacagagagttattttattcctgaagtccggatctatgactcagggacatataaatgtactgtgattgtgaacaacaaagagaaaaccactgcagagtaccaggtgttggtggaaggagtgcccagtcccagggtgacactggacaagaaagaggccatccaaggtgggatcgtgagggtcaactgttctgtcccagaggaaaaggccccaatacacttcacaattgaaaaacttgaactaaatgaaaaaatggtcaagctgaaaagagagaagaattctcgagaccagaattttgtgatactggaattccccgttgaggaacaggaccgcgttttatccttccgatgtcaagctaggatcatttctgggatccatatgcagacctcagaatctaccaagagtgaactggtcaccgtgacggaatccttctctacacccaagttccacatcagccccaccggaatgatcatggaaggagctcagctccacattaagtgcaccattcaagtgactcacctggcccaggagtttccagaaatcataattcagaaggacaaggcgattgtggcccacaacagacatggcaacaaggctgtgtactcagtcatggccatggtggagcacagtggcaactacacgtgcaaagtggagtccagccgcatatccaaggtcagcagcatcgtggtcaacataacagaactattttccaagcccgaactggaatcttccttcacacatctggaccaaggtgaaagactgaacctgtcctgctccatcccaggagcacctccagccaacttcaccatccagaaggaagatacgattgtgtcacagactcaagatttcaccaagatagcctcaaagtcggacagtgggacgtatatctgcactgcaggtattgacaaagtggtcaagaaaagcaacacagtccagatagtcgtatgtgaaatgctctcccagcccaggatttcttatgatgcccagtttgaggtcataaaaggacagaccatcgaagtccgttgcgaatcgatcagtggaactttgcctatttcttaccaacttttaaaaacaagtaaagttttggagaatagtaccaagaactcaaatgatcctgcggtattcaaagacaaccccactgaagacgtcgaataccagtgtgttgcagataattgccattcccatgccaaaatgttaagtgaggttctgagggtgaaggtgatagccccggtggatgaggtccagatttctatcctgtcaagtaaggtggtggagtctggagaggacattgtgctgcaatgtgctgtgaatgaaggatctggtcccatcacctataagttttacagagaaaaagagggcaaacccttctatcaaatgacctcaaatgccacccaggcattttggaccaagcagaaggctagcaaggaacaggagggagagtattactgcacagccttcaacagagccaaccacgcctccagtgtccccagaagcaaaatactgacagtcagagtcattcttgccccatggaagaaaggacttattgcagtggttatcatcggagtgatcattgctctcttgatcattgcggccaaatgttattttctgaggaaagccaaggccaagcagatgccagtggaaatgtccaggccagcagtaccacttctgaactccaacaacgagaaaatgtcagatcccaatatggaagctaacagtcattacggtcacaatgacgatgtcagaaaccatgcaatgaaaccaataaatgataataaagagcctctgaactcagacgtgcagtacacggaagttcaagtgtcctcagctgagtctcacaaagatctaggaaagaaggacacagagacagtgtacagtgaagtccggaaagctgtccctgatgccgtggaaagcagatactctagaacggaaggctcccttgatggaacttagacagcaaggccagatgcacatccctggaaggacatccatgttccgagaagaacagataatccctgtatttcaagacctctgtgcacttatttatgaacctgccctgctcccacagaacacagcaattcctcaggctaagctgccggttcttaaatccatcctgctaagttaatgttgggtagaaagagatacagaggggctgttgaatttcccacataccctccttccaccaagttggaacatccttggaaattggaagagcacaagaggagatccagggcaaggccattgggatattctgaaacttgaatattttgttttgtgcagagataaagaccttttccatgcaccctcatacacagaaaccaattttcttttttatactcaatcatttctagcgcatggcctggttagaggctggttttttctcttttcctttggtccttcaaaggcttgtagttttggctagtccttgttctttggaaatacacagtgctgaccagacagcctccccctgtcccctctatgacctcgccctccacaaatgggaaaaccagactacttgggagcaccgcctgtgaaataccaacctgaagacaccgttcattcaggcaacgcacaaaacagaaaatgaaggtggaacaagcacagatgttcttcaactgtttttgtctacactctttctcttttcctctaccatgctgaaggctgaaagacaggaagatggtgccatcagcaaatattattcttaattgaaaacttgaaatgtgtatgtttcttactaatttttaaaaatgtattccttgccagggcaggcaaggtggctcacgcctgtaatcccagcacttcaggaggctgaggtgggcggatcacctgaggtcaggagtttgagaccagcctgatgaaaccctgtctctactaaaaatacaagaattagccgggcgtggtggcgcatgcctgtagtatcagctactcaagaggctgaggtgagattatcgcttgaacccaggaaacggaggttgtagtgagcggagatcgcgccactgcactccagcctgagtgacagagtgagaatccatctcaaaaaaaacaaaaaacaaaattgcttgctaaagaagtggtctcctgaggtcttaagacattcctgacagtgtcttgagtgggtgggagagaggctgctgtcattgcgctgtggaatttcacagatgagaaccacgcctagccaaaatcacttttcctgtttgcctcagtgacacagctgcagggaccctcgtggatgttgtattaaataaatttgacctttgctctttgcagatctgtgaaatgttgtcttctgaggggccacatgcatctatagtgctgaggactccttgggcctctgaagtcacagagagaaccgagcaggtctatgtttttgttttgttgttttgagacggagattcgctcttgttgcccgggctggactgcagcggcgcaacctctgctcactgcaacctccgcctcctgggttcaagcagttctcctgtctcagcctcccgagtagctgggattacaggcacatgtcaccacgcctggctaatttttgtatttttagtagagatggggtttcaccacgttggccaggctgatctcgaatgcctgacctttggtgatctgcccgccttgtcctcatgtgtgctccacaggcctttgggttgggattgcaggcgtgagccaccatgcccagcctagactcttttgacaatatgatgaaagctgttggttcctttccccaacacacacacaccgagttgtatcacgaaaatgtcatacaatttccaggttttctgagtggtgggctcagattgaggtcaaaggatcagacgacctctaacgaccttcatgtctctgttgatgatctggggacagccagatcccctgtgtccagggagttccttagtcccttgccaccaccagagaagggcaattgccacgggagctgcaaagaccctattcctactcctggtgccttacttatgcagcacgactgaattttttgttttgttttgttttgttgagacaggggcttgctctgttgcccaggctggagtgcagtggcacaacaatggctcaccgcagcctcgaacccctgggctcaagcgatcctcccatctcagcttcctgggtagctgggaccagaggcgtgagccgccatagctggctaatttttaattttttttttgcagagatgaggtttcaccatggtgcccaggctggtctcgaacttctgggctcaagtgatcctccctccttggcctcgcaaagtgctgggattgcaggcatgagccaccgcccccggcctgtggagcacacatgagtttaaaattactttcccttctgcctatatttccgaggaggaaacttcatgcgcagggatctttcttagtggatttaatggctaaaaggtctgtctgaatccaggacgctggctttagccttcctcggcagctgccgtaaccccggtgtctaaacctgaagcatcccaggagcacccactccaggagttttctcggccgcggaactcattagttagagcgccctcttgtgttctcatgtggtaatcggtcactgaaggacttaaaatggtccttagccaacacacagtaaaacttttccctcttctgaccccaagaggtcagccacccatttcatgagcatatactggtcgccccatcagcgttctctgattggctaactgaacccactccccgacctagactcaagacaggcgaagtgacgcttaggtcaacattcactcactaaagcaacgactgtcgggcgattttgtctcccgctggttttggaatggtgtctggagacatttttggttgtcacagctgggtgggtgtgctcccggcatctggtgggtagaaaccaagcatgctcctaaacatcctacaggcacagaaccgtctcccacgaccaagcatgatcaagtcccaaatgccaataatggccaggttgagaaactctgcacagaagcatccagttatttgtctgtttgctcaacaagcttgtgctcatcatgctctgtgttcctgacgctgtgctgggtgttggcggtgggaagattacaagagtcacatggcagctgtcctcctggaaggtacaacccagtagagatgcagactaacagagagccaattacaaagcagtgtgacaagcgtcatggtggaaaattaaaagctcaaacaagggcacatgggaggggcttccaacacagactttgggggatccaggaaggtctaagaggaaagtgggtctcaccaaagccttgaccataggcagagggtaccagtggaaaaggtggggtgaagaacattgaggacaaaaggaagaagtgcaggaaggccctgaggcaagggagtggggggtgccctggagggatggcagcagggcagtctgtcagacccaagtggcctccagccctagaagccaattagtcctcctcaaaaagctgtcactgtcccctaagaattgctgccaggctcccactggcctgactcagtctttgagagtcttaaggaggaggtctctgaaaggtacacaccaagaactctccccagcacagctgtttttaagactctccaccagcgtcattggcgtgttgggaagaaaccctctgccacagaggccagcttcagcctttgcctaacaccgcaagggcaaatggaaaggtaaacgggaaggagatgtctccccagcaggctatttgaggacagtcttccctgcagaagatctcaacctggggtccacagagtggaaatgttagagtagggagctaggcaaacatgagcaggacaggtgagggcccccacaggaatgtcaggctaccatcaggtgatggtcaggtggttgttaaactgtctctgtaaaataataattggttgcagccagctccaagcaaggacagtctctcaatagatacaaaacaccctgatctggtgatcagccgcttcccgataagatctcaggagctgggcaagcagcctggagcatgcgcaccaagaggcaaaatggcggaatttaaccagtatatgacctaccttcctctgggaacgcacgactggtaaggggaaaaatgcctcaagtgagcatgcgcgcaacttcagtaatcacactgtgcatgcgaccccttccaagtgctggcaggtcaccacatacgcggacagcctgctgcaagggaagaatcaggggagatgagacgtaaatcccagaactatgccaaatacataaaaccccaagttaagggtcaggcagggcacttagatctctcaagttgcctgcctgacccaagtgtagtgtacttccttttgttcctgctctaaaactttttaataaactctcactcctgctctaaaa

SEQ ID NO: 601 - protein, 738 aa, Homo Sapiens
MQPRWAQGATMWLGVLLTLLLCSSLEGQENSFTINSVDMKSLPDWTVQNGKNLTLQCFADVSTTSHVKPQHQMLFYKDDVLFYNISSMKSTESYFIPEVRIYDSGTYKCTVIVNNKEKTTAEYQVLVEGVPSPRVTLDKKEAIQGGIVRVNCSVPEEKAPIHFTIEKLELNEKMVKLKREKNSRDQNFVILEFPVEEQDRVLSFRCQARIISGIHMQTSESTKSELVTVTESFSTPKFHISPTGMIMEGAQLHIKCTIQVTHLAQEFPEIIIQKDKAIVAHNRHGNKAVYSVMAMVEHSGNYTCKVESSRISKVSSIVVNITELFSKPELESSFTHLDQGERLNLSCSIPGAPPANFTIQKEDTIVSQTQDFTKIASKSDSGTYICTAGIDKVVKKSNTVQIVVCEMLSQPRISYDAQFEVIKGQTIEVRCESISGTLPISYQLLKTSKVLENSTKNSNDPAVFKDNPTEDVEYQCVADNCHSHAKMLSEVLRVKVIAPVDEVQISILSSKVVESGEDIVLQCAVNEGSGPITYKFYREKEGKPFYQMTSNATQAFWTKQKASKEQEGEYYCTAFNRANHASSVPRSKILTVRVILAPWKKGLIAVVIIGVIIALLIIAAKCYFLRKAKAKQMPVEMSRPAVPLLNSNNEKMSDPNMEANSHYGHNDDVRNHAMKPINDNKEPLNSDVQYTEVQVSSAESHKDLGKKDTETVYSEVRKAVPDAVESRYSRTEGSLDGT

SEQ ID NO: 602 - DNA, 12969 bp, Homo Sapiens
gaagcaccgcctacgtcgggctgcgtgacaatggggccggcggcagaacgcagctgcggcggctgcgggtctcgtgggggcggagcggtcgccgctgccgccgcagctcgggtcgggatttgaaagattagaaacttcgggtggagagggcggcggcgttgaatgtgtggcggaagcgctgggggtcacggctccgcgcgccgccggacagccggcggcgtctccacagcatgaattacccgggccgcgggtccccacggagccccgagcataacggccgaggcggcggcggcggcgcctgggagctgggctcagacgcgaggccagcgttcggcggcggcgtctgctgcttcgagcacctgcccggcggggacccggacgacggcgacgtgcccctggccctgctgcgcggggaacccgggctgcatttggcgccgggcaccgacgaccacaaccaccacctcgcgctggacccctgcctcagtgacgagaactatgacttcagctccgccgagtcgggctcctcgctgcgctactacagcgagggtgagagcggcggcggcggcagctccttgtcgctgcacccgccgcagcagcctccgctggtcccgacgaactcggggggcggcggcgcgacaggagggtcccccggggaaaggaaacgtacccggcttggcggcccggcggcccggcaccgctatgaggtagtgacggagctgggcccggaggaggtacgctggttctacaaggaggacaagaagacctggaagcccttcatcggctacgactcgctccgcatcgagctcgccttccggaccctgctgcagaccacgggtgcccggccccagggcggggaccgggacggcgaccatgtgtgctcccccacgggcccagcctccagttccggagaagatgacgatgaggaccgcgcctgcggcttctgccagagtacgacggggcacgagccggagatggtggagcttgtgaacatcgagcctgtgtgcgtgcggggcggcctctacgaggtggatgtgacccaaggagagtgctacccggtgtactggaaccaggctgataaaataccagtaatgcgtggacagtggtttattgacggcacttggcagcctctagaagaggaagaaagtaatttaattgagcaagaacatctcaattgttttaggggccagcagatgcaggaaaatttcgatattgaagtgtcaaaatccatagatggaaaagatgctgttcatagtttcaagttgagtcgaaaccatgtggactggcacagtgtggatgaagtatatctttatagtgatgcaacaacatctaaaattgcaagaacagttacccaaaaactgggattttctaaagcatcaagtagtggtaccagacttcatagaggttatgtagaagaagccacattagaagacaagccatcacagactacccatattgtatttgttgtgcatggcattgggcagaaaatggaccaaggaagaattatcaaaaatacagctatgatgagagaagctgcaagaaaaatagaagaaaggcatttttccaaccatgcaacacatgttgaatttctgcctgttgagtggcggtcaaaacttactcttgatggagacactgttgattccattactcctgacaaagtacgaggtttaagggatatgctgaacagcagtgcaatggacataatgtattatactagtccactttatagagatgaactagttaaaggccttcagcaagagctgaatcgattgtattcccttttctgttctcggaatccagactttgaagaaaaagggggtaaagtctcaatagtatcacattccttgggatgtgtaattacttatgacataatgactggctggaatccagttcggctgtatgaacagttgctgcaaaaggaagaagagttgcctgatgaacgatggatgagctatgaagaacgacatcttcttgatgaactctatataactaaacgacggctgaaggaaatagaagaacggcttcacggattgaaagcatcatctatgacacaaacacctgccttaaaatttaaggttgagaatttcttctgtatgggatccccattagcagttttcttggcgttgcgtggcatccgcccaggaaatactggaagtcaagaccatattttgcctagagagatttgtaaccggttactaaatatttttcatcctacagatccagtggcttatagattagaaccattaatactgaaacactacagcaacatttcacctgtccagatccactggtacaatacttcaaatcctttaccttatgaacatatgaagccaagctttctcaacccagctaaagaacctacctcagtttcagagaatgaaggcatttcaaccataccaagccctgtgacctcaccagttttgtcccgccgacactatggagaatctataacaaatataggcaaagcaagcatattaggggctgctagcattggaaagggacttggaggaatgttgttctcaagatttggacgttcatctacaacacagtcatctgaaacatcaaaagactcaatggaagatgagaagaagccagttgcctcaccttctgctaccaccgtagggacacagacccttccacatagcagttctggcttcctcgattctgcatatttcagacttcaagaatcgttctttaatctcccacaacttctttttccggaaaatgtaatgcagaataaagataatgccctcgtggagttggatcacaggattgattttgaactcagagaaggccttgtggagagccgctattggtcagctgtcacgtcgcatactgcctattggtcatccttggatgttgccctttttcttttaaccttcatgtataaacatgagcacgatgatgatgcaaaacccaatttagatccaatctgaactctcttgaaggacatgaatggcctaaaactgattttttttttttccgttaaaatgtgtgtgtcaagatacggagatttcagggttaaagtatatttcagttttctttagggcaacatatatttgaatttaaaagcactttatttaaaaaaaaaagaagttttcagttctgaagaagtcatttacagtttgcatcattttaattatgagtctgacaaaaccttctccagagaatcaagcaagacctggatgtgaagaaggtttgggtaaactgcatgtaaaggctacaaatcacaatctgattcctcccaaatataaaggcatatggaacataatgtattaaccaaagtatgttataaatcaaaaatggtcaaggttcagcatattctatatgaagatcacaaggtggtatcgttttagatttctatgaaggctttcatttgtacatccctttgaaaaaatataacagatttaaaatgttttgaatttaacttgtttagaaaaactaatgcttaaaacaatatttgaactactgtatttataatttattacctctaattgctttatttcagtgtatgagacattactgttttaatgtttgctttgaacataatttaagaaccagatttattttctatagtgataaacccttttttctcagaactccatctttgtactcttcagatgaatatatagacactgtggcatacattttttttcattaaaaacttatggcttcatacaacactagttcaattttttaaataaactttttattatgttacatgtacttcagagaaagctaaagtttctctaaacttgacacggagtactccataatgggtacatttcattagctttattagaaaactagtaaatgcttttgaataggtagtatgacagctattttaaatgtataaacatttgtgtgccaaacaacatatatgaagggatgtgatgccactaactagtgcacattgtttctcaatgtgccattgagacacaaggcacagtaagtcaggattctgaggcattggaagggttttcttcagctgtaattgtttccacagtgcttttcatctgaggggctcaaagtttaagagtgcattcaataacccatgtactagcttcttgaggtaagtaaataaatcttgttctcatgttacatgttaatacaccaaggcaccaaaacatttaaagtgccatgaattagattacatcagaaatcagaaaagcttggattgagctagtcaccgtggttcacgcctgtaatcccaacacttcgggaggccaagatgggaggatctcttgagcccaggatttcaagaccagcttgggcaacatagtgagaccctcttctctgcaaaaactgacaaaaattagccacttgtagtggtgtacacctgtagtcccagctactcaagaggctgaggtgggaggatcacccgagcccagaagttcaaagctgcagtgagctctgatcacaccaatgcactccagcctgggtgacagagccagaccctgtctctaaaaaacaaaaaagaaaagcttgggttgaagccaggccatattcttttatatgctgttcaatgacttgattcacatgtgaccttttagtagtttgcaaacaataataacagaagttgcaattcataattcagagaaatgaccatgaagccggtgtttccctgcttgatttctatgttcttggattctcacacaaaagaggagttacctagaggggatcagtagccatccctgttgcacacaaccctcacttctgagtggtttccactaggttccacttaaggtgctgtcttttcttaacttgcaaggaattgcttagcttcccaataatcattgtcaaactgggagcaaagttggtcagctgtatctctcacctcctcctttcttcataagatagtagaatctgtggcttacttgtaggttttacttagtgcttcagtactgttggctgttttggccttttgctgaatttgcacaacaacataaagcacttctttttaatgtttaaaaaaaattccaaggctccatgaccaagtatgtgactcactaagaaacccttgctataaaaggcttttgatgaaatcttagcaaagctaaattatctctaacttagagattcctatgaactcaggtcattttcatagcctgtttattttgtaggtctaatttagttctcaggaaaattaaactcatgctatatgactgtatcgttaaaggtacttgagcgtatgttgctgtaggtggtatgacactcaaatgcataagaacttgaagggatttattcttaaccactagaatatgaagagccctttttacctgagaagagtgaaattatgtcagaccttttaatttgatatcactgagtaaaaggtatgttcctatagccataggaatatgtctgcttcctttttttcatgttgagaaaacagtcaaatttaaccatttggagtttatttgaattcttggaaagagcaatattcaaaaccttttcaaaaataagatattctggactactggatggatgttttgttttcagttcatttttcatcagtagagatggtgatttcggttttgtagtatccttgtttctatgtctgtgcatgttaacattggatgtatttgtatatacttaattaatatacagactgtgtgtcattctggcttgattagaagctaagtcagttactgagtaacattttgcaactttattccagcaagtactaaatcggccaaaaaaagttttgtttttgataccattaaaattttattctctattttgtgtacatgctatgatgattctcccaagtactgattagatcactgaactttagttagcttcccaagaattattaaccgttagaataagacttagattaaatcttgctttatttttactttaaaattagtcttgctaaggccttatgttagttcatactttcttttcaacagtaatcttgtttataatccagtgtttctgtgttttaggacataatttaaaaatatactggattttggccaggtgtggcagctcatgcctgtaatcccagcactttgggaggccaagcagggaagattacttgagcccaagagttgaaaaccaacctggacaacatggtgaaacccagactctacaaaaaatgcaaagattagctgggtgtgttggcagacgcctgtggtcccagctactcaggaggctgaggtcggtaggactgcatgattccgggaggtcaaggcttcagtgagccaagattgcaccactgcactccaccttgggtgacagagctggacactgtatccaaaaaaaaaaagtatgtatttacacacacacacacacacacacacacacactggatgttctaataactgctcttttgtatgtgaagcaagccttaggaatcttacgttttacttctttctgttaaacggcatctgttatcttttgaagtactcacactgaacatgcttcatgctgaatactcacgctaaaggcctcagacatgtaaacattcatccttagtctcttttttctctgttttctcattgggagctgaagcatcctagtctgcagaaaatttaacacaccatattccagctttgcatcacctagacagtagacaaaaggaaaagaaattgtcagtaccgtatcacagctagtgcctctgttcattccagtgatagtacatgagccccttccagtggagtcagatcaagccaaaagattttcctgtaaagtctgtagtagaagacaaatttctttttgatccattagattggtatttctatcttctcagctaattaatgagtaaggcatgtggacaatcgagaaaactaatttgagtgtatgtattaaaattgctcttctaaaaacacgtaaaatattaaagatcaaggcagagcaaaaaagaacgtagcaatcatatactagaaaaagaaactaagttttgctaaactatgtttgggttagttgacctctgtagctattctaaagttttctatcccttatctgtattccgctgtcattcctgtgcctcaagcctctgccaggaatctgatggtactctggctgaacttaaaacataagaatctcaaaggtctcatttagtaaatgttagtgctaagttggtgacagcctgggttatatgctttctctttcagtcttcagtagatgcttgtgatagttttcaaagaactgtaaaatttccgggtctgtacagatttttagagatcatttaatccaaccctgttacagtatcatgtcagcatttaaatagcagtaaaggtcatgaaaagtgaagtgaaaggcagcaaactccatgaaaaactaaatacagtgacaactgagggaagtggtaaagtaaaaaaatattaatgatggaattttaaagctggaaggggcatagagaccattcttttctcaataatattctgcaaatattaacaggtgtcatgtcagaaactaagtttaggaattgacaaattcaaaaatctcccttacagcagggctttgagagcctttgctacactaaatgctctgtgaatctatctggtgctgcgtgggggcctccaaatttatttaaccatattttttaatttggcatttacctagagaaatgctatcacatttaattccttcgttttacagtttcacctcctcatgtgattccttcattttgtaagtgaccgattccaccctatacaatcacatggccaatgaatgacagtcagaattagaacctagtcccctgattcccaaccatgtcttataccagactgtttcccctaatcgataggaaactactcctaaagggcagaaactgcctctctttgtttttgtcccccaacctcccctccacacatacacctctgtaatctgatgctttaagctcagattaaagcatcagcaagctttaatctgacacatggccgtaggcttgagttagcagttggtcccttctttcttccagactctcataagagtaccctatcaggtctggacagacttccgtttatgcctcagattcaaaatacccaggaaaaagaagaagaaatacaaaacaacaaaaagaaaatcaagaaaaaaataagatatccaggaaatattttgttagttttctattctggtgacaaatgcaaacttaaggaaacaagttgcacagtgttaactaatgtttaacattcctttccatagtgtttatgtgggccttttatcaattcatgacaaataggtcacctccaaaactgttccaacataggttaactcagaaatttaaaatttaagtactatcctttttggagactatgagaagagtttttactattgtgttttgttttgttttttggtgtgtgtgtgtatgtatgtgcattccccaaaaatagtccattggcagattgttagggtgaacttttcctctgcctttgtgtttgtataagggcgggtgcatgcttagtattgtctgctaccttatggtttttcatttatatgtaacatggtacaacttgcttcctccccacccaacagttgtcaggatatgttggggaatattctttaggaagattacatctggtcttctgttggagtaagatgaaaaacaagtatgttaacacttgacctttactgctttctcctggaagacattgaatatctaggagcgtcactcataccttcccttgactgtacccacacccactgcggtccctgcttgatctctcaaactttttgtttccctttgagcttcatgacaaaaaattataaccattttctggttctaaggctgccataatcccaactttgccagtaagaagatggagaatttttgctcatagggacatttctcagaagcagctggcaccataactctcctgagacccttgtttcctttctttcagctcctatgacttcttatgttcactctctctaacactactaaatgttgtcaatgactgcaatcacaactctttgaaggcaggctttttcttttcctttgttacctcttattttcaatagccaaagcaggttagttttctcagaatcttcagttttactgaagcatgcattatttctgttttctctctgcagtgatcagtttggatgacagaaactttaaacttttattctggcattgtccagttctgattttctcagctggaactggtgcatgcacatttaataatttcaaagaagtgagaggtaaatgttttctcctgcattatactgtgtttctctagctgaattgatccgtttgttatcttgctcacccgaaacaagtagttgtgccctacagtgagcaacctcagactaggctgttctaagcattctggagaaaataatcctcatcatacagtttgtggtaactcttccaaaaagtttatgaaaattgaaagatctccctatgcatcagctgtggctgccacattccgttctactaggaaggctagtggccacaactccctctagaacatcagaggataaagtacacttatatattagaaaagacaggcatattctgattatggttcattcacaatttctcagtccagggttcagtcagtgaccatagctctgaggtcttcaggctaactccaagaacccgtgccagatagaaacctactcctactacctttccactcaccttcccattcccccacctttgctaccaaagtgactttaaaagtcgagttttaggtgtttgtttttttaacagtctaggaatttcagtgcaattccgtgaggtggtgctgaccttagatgagaaatacgtggccaggctataaggactacatgtagaattgagatgggacagtgtacgtatggactgtgaggggaaagaaaaggtaaatgtgtgaaaggaaagagattggtgcatggtcatgacagtctgacagcttagacatttcagaggcattgtttatgagaaaggggatagggacacataggtctgatgacaaccaaagccctttgatgatgccatctgtcactcaaggctccccacagcctgcccaacctgactctcctgcctgcttctccactgcctaccttcaacaatcaaactatatttttgttacagcaaactacattccatttgcctttaaatgcttgcattttagttattgtactggctacctgtttttgtctgcccagcatcctgtttcccctccttttggatcctctcctagccaattccatgtcttgaatcctttcctgctccttgttaaaattattttctgctttgtgtgagtccctgtaagcaccagcagctcaatcagcactgtctgtaccatggtcaagagatgagtacatgactcaggtcagaccttatttcccaccccataagccacaatgattagacaagaaataggcacagaaccctaactagatagggcagaagccttccataggattttatttgctggccctgaaatgcaggtagccttctatggctgttaaacacaatccagtggcacatggggtgatatgaggatggagccatccatggcaaaactccaccctttcctgtgacatggattatgtgcatctgccatgaaaaggaagcatacacaagaaatgagccaagagttcctggagaactgaagcaagtatcacctccagatcagttgtacttttatttgcttacactattctgaggtgggtctctgtctcttggatccaaaagagttcaaattaataatcatttgacaaaaaattacctccacattcctaatgaagttgtctttgaagataatgtcttgtgatcccctggttgaagttaattactgcttgtgagcccccattaacaacgtgttcctttccccattgcttgcttgtatcagctttgctgaagatctattggctgtaggtgtgcagctttatttctgtgttctctattgtgttccattggtctacgtgtctgttattgtaccagtgccgtgctgttttggttactgtggtcttatagtttgaagccacatctgtgtgatgctgctggctttgttctttctgctttgggttgctttggctattcaggctctttctttggttccatctgaattttagaatagttgttttctaattctgtgaaaatgttccaacctctgtgaaaaatgaggttggtagtttgataggacagcattgattctgtaaattgctttgggcagtatggccatttttaaactatattgattcttccaatccatgaacatggaatgtttttccattttttggtttcatccctgatttctttctgccatgttttgtagttctccttgtagagatctttcacctccttggttaggtgtatttttaagtatttcagtttttttatggctattgtaaatggtattgggttcttgatttgctctcagcttgaacgttattggtgtatagaaatgctcctaatttttgtgcattgattttgtatcctgaaacttgactaaagttgtttatcagtctaggagcttttggcagagtcttcggggttttctaggtataaaatcatatcagcgaagagagctagtttgatttcttttcccagttggatgccttttatttatttctcttgcctgattgctctaagttgaatgggagcgatgagactgggcatcctcttcttattccagttctcagaaggaatagttccagcttttgctcatccagtatgatgtctgtgggttggttgtagatggctcttattattttgagatatgttcctttgatacctagtctgttgaggggttttatcatgagggatgttggattttatccgtattcaataaatggtgttgggataactggctagccctatgcagaagaatgaaactggaccccccacctttcaccgtatatgaaaattaactcaagatggattaaagatttaaatgtaagacctcaaactgtaaaaatcctagaagaaaacctaggaaatacccttatcaacatcagccttggcaaagaacttttggctaagtccccaaaggcaattgcaacaaaacagaaattggcaagtggggacctaattaaagcactctgcacagcaaaagacactatcaacagagtaaacagacaacatacagaattggagaaaatatttgcaaactagacatccaacaaagatctgacatccagaatcaataaggaacttaacaagcaaaaaacaaccccattaaaaaatgggtgaaggacatgaacagacacttctcaaaagaagacatacaagcaatcaacaaacgtgaaaaaatgctcatcactaatcatcagagaaatgcaaatcaaaaccacaataagataccatctcacaccagttagaatggctattgtaaagaagtctaataacatgccagtaaggtttcagagaaaagagaacatttatacactgttgtgggaatgtaaattagttcagtcactgtggaaagcagtttggagatttctcaaataacttaaaacagatctaccattcaacccagcatatgggtttatttcccaaaaggaaataaatccttctaccaaaaacacatatggtcatcacagtgctattcacagtagcaaagacagatcaacgtggctgcccatcaacagtggactggataaagaaaatgtggtacatataaatcatggagtattaggcagccataaaaagaacaaaatcatgtcctttgcagccagccacatggatacagctggaagccataatctaagcaaattaagaacagaaaaccaagtactgcatgttctaacaaatgggagctaaatattgagtacctcaggatgcaaaggtgggaacaacagacactgcagactggaacactgtgggtgaggagggcagaaggataggttgaaaaactacctattgggtactatgctcactacctgggtgatgggatctgtacctcaaacctcagcatcacacaatatacccttgtaacaaacttgcacatttacccactgtttctaaatgaaaagttgaaatattttttattaaaaaacacaaaagcaatatgtttctcaataaaaaaaaaa

SEQ ID NO: 603 - protein, 900 aa, Homo Sapiens
MNYPGRGSPRSPEHNGRGGGGGAWELGSDARPAFGGGVCCFEHLPGGDPDDGDVPLALLRGEPGLHLAPGTDDHNHHLALDPCLSDENYDFSSAESGSSLRYYSEGESGGGGSSLSLHPPQQPPLVPTNSGGGGATGGSPGERKRTRLGGPAARHRYEVVTELGPEEVRWFYKEDKKTWKPFIGYDSLRIELAFRTLLQTTGARPQGGDRDGDHVCSPTGPASSSGEDDDEDRACGFCQSTTGHEPEMVELVNIEPVCVRGGLYEVDVTQGECYPVYWNQADKIPVMRGQWFIDGTWQPLEEEESNLIEQEHLNCFRGQQMQENFDIEVSKSIDGKDAVHSFKLSRNHVDWHSVDEVYLYSDATTSKIARTVTQKLGFSKASSSGTRLHRGYVEEATLEDKPSQTTHIVFVVHGIGQKMDQGRIIKNTAMMREAARKIEERHFSNHATHVEFLPVEWRSKLTLDGDTVDSITPDKVRGLRDMLNSSAMDIMYYTSPLYRDELVKGLQQELNRLYSLFCSRNPDFEEKGGKVSIVSHSLGCVITYDIMTGWNPVRLYEQLLQKEEELPDERWMSYEERHLLDELYITKRRLKEIEERLHGLKASSMTQTPALKFKVENFFCMGSPLAVFLALRGIRPGNTGSQDHILPREICNRLLNIFHPTDPVAYRLEPLILKHYSNISPVQIHWYNTSNPLPYEHMKPSFLNPAKEPTSVSENEGISTIPSPVTSPVLSRRHYGESITNIGKASILGAASIGKGLGGMLFSRFGRSSTTQSSETSKDSMEDEKKPVASPSATTVGTQTLPHSSSGFLDSAYFRLQESFFNLPQLLFPENVMQNKDNALVELDHRIDFELREGLVESRYWSAVTSHTAYWSSLDVALFLLTFMYKHEHDDDAKPNLDPI

SEQ ID NO: 604 - DNA, 1999 bp, Homo Sapiens
ccggagccccgccagagcccgacttcagccccagccagatcccgcgtcaacggaggcggaacggcggaccccgtaccctggcagcatcggagcaccggcgggtgaaggcaaggtccctggactggtcatatacctcttgtggccctggcagaatcaagatgaggccctgtcatgcctccccagtgaggcctacagtctgagcagacagcatggcctgccactggcagtgaacaccatgtctgcaggaggtggccgggcctttgcttggcaagtgttcccccccatgcccacttgccgggtctatggcacagtggcacaccaagatgggcacctgctggtgttggggggttgtggccgggctggactgcccctggacactgctgagacactggacatggcctcgcacacatggctggcactggcacccctgcccactgcccgggctggtgcagctgcggtagttctgggcaagcaggtgctagtggtgggtggtgtggatgaggtccagagcccggtagctgctgtagaggccttcctgatggatgagggccgctgggagcgtcgggccaccctccctcaagcagccatgggggttgcaactgtggagagagatggtatggtgtatgctctggggggaatgggccctgacacggccccccaggcccaggtacgtgtgtatgagccccgtcgggactgctggctttcgctaccctccatgcccacaccctgctatggggcctccaccttcctgcacgggaacaagatctatgtcctggggggccgccagggcaagctcccggtgactgcttttgaagcctttgatctggaggcccgtacatggacccggcatccaagcctacccagccgtcgggcctttgctggctgcgccatggctgaaggcagcgtctttagcctgggtggcctgcagcagcctgggccccacaacttctactctcgcccacactttgtcaacactgtggagatgtttgacctggagcatgggtcctggaccaaattgccccgcagcctgcgcatgagggataagagggcagactttgtggttgggtcccttgggggccacattgtggccattgggggccttggaaaccagccatgtcctttgggctctgtggagagctttagccttgcacggcggcgctgggaggcattgcctgccatgcccactgcccgctgctcctgctctagtctgcaggctgggccccggctgtttgttattgggggtgtggcccagggccccagtcaagccgtggaggcactgtgtctgcgtgatggggtctgaaggcttggtgggagctgtccactggagcagctcattgccagaggcagctatttctatggctccttttgctgctgaggacactcactgtggctctgtgggatgagagaggcatgggggtgagcacttgaaacactgccttggggccttgggttaggggagcctttgtctttagtgcaggacacacatatgcttacacctacctttatcaccattcgttcatgaatcatgcctagctccatccttgccctgggacctactaggccttccatccaactgggaaatggggagaagcaaagctggcctcatgctcttcagggtcagttcctatctggagttgaccaggcctaccccagttgccattcctgaaaaatctcagctgccaggctgcctttagggtccctgcagacccaggagagttgagagggtgggggacacagagagaatagagaggatgtgggaactgccagagggccggagcgcaggagttcaagtggaggaatgctggctttgagccctctacactgctggttgtatgaccttggacaagtcacttcacctctctgtgcctcagcatcctcatctataaatggggatctctgaaaccttcctaccctacctacctcacagggctgttgtgaggacccagggagtttggatgtggaagtaaaagtgctgctaaaacctaaaaaaaaaaaaaaa

SEQ ID NO: 605 - protein, 354 aa, Homo Sapiens
MSAGGGRAFAWQVFPPMPTCRVYGTVAHQDGHLLVLGGCGRAGLPLDTAETLDMASHTWLALAPLPTARAGAAAVVLGKQVLVVGGVDEVQSPVAAVEAFLMDEGRWERRATLPQAAMGVATVERDGMVYALGGMGPDTAPQAQVRVYEPRRDCWLSLPSMPTPCYGASTFLHGNKIYVLGGRQGKLPVTAFEAFDLEARTWTRHPSLPSRRAFAGCAMAEGSVFSLGGLQQPGPHNFYSRPHFVNTVEMFDLEHGSWTKLPRSLRMRDKRADFVVGSLGGHIVAIGGLGNQPCPLGSVESFSLARRRWEALPAMPTARCSCSSLQAGPRLFVIGGVAQGPSQAVEALCLRDGV

SEQ ID NO: 606 - DNA, 5679 bp, Homo Sapiens
gcttttctccttggcatggtcacggaatggatacctgtttgatcttcctgcactgctgagaaatcttccttttgggggagaggattaagtctgggttgaggtaggccacctgttgagacctggtgaaagatcaggtataataatgttctgcagtgaaaagaaattgcgtgaagtggaacggatagtgaaagccaatgaccgtgaatataatgaaaagttccagtatgcggataatcgtatccacacatcgaaatataatattctcaccttcttgccaattaatttatttgaacagttccaaagagtggcaaatgcctattttctttgccttctgattttacagctaattccagaaatttcctccttgacctggtttaccaccattgtgcctttggtcctggtgataactatgacagctgtcaaagatgccacagatgactattttcgccacaagagtgataatcaagtgaataatcggcagtctgaagtgctcatcaacagcaaactgcagaatgaaaaatggatgaatgtcaaagtgggagacatcattaaattagaaaataaccaatttgttgctgctgatttacttctcctatcaagtagtgagccacatggtctctgttatgttgaaactgctgagcttgatggggaaacgaacctaaaagtccgccatgcactatcagttacttcagaacttggagcagatatcagcagacttgcagggtttgatgggattgttgtctgtgaggtgcctaacaacaagttagataaattcatgggaatcctttcttggaaagacagcaagcattccctcaacaatgagaagataatcctgagaggctgcatcctgagaaataccagctggtgttttggaatggttatttttgcaggtcctgacactaaactaatgcagaatagtggtaagacaaagtttaaaaggacaagcattgatagattgatgaatactctagtactatggatttttgggtttctgatatgcttgggaattattcttgcaataggaaattcaatctgggagagtcaaactggggaccaattcagaactttcctcttttggaatgaaggagagaagagctctgtgttctccggattcttaacattctggtcatatattattattctcaatacagttgtacccatttccttatatgtgagtgtggaagtaattcgtctaggacacagttattttataaactgggaccggaagatgtattattctcgaaaagcaatacctgcagtggctcgaacgaccacgctcaatgaggaactggggcagattgagtacattttctccgacaaaacgggtaccctcactcaaaacatcatgacctttaaaagatgttccattaatgggagaatctatggtgaagtacatgatgacctggatcagaagacagaaataactcaggaaaaagagcctgtggatttctcagtcaaatctcaagcggatagagaatttcagttctttgaccaccatctgatggaatccattaaaatgggtgatcccaaagttcatgaattccttaggttacttgctctctgccacactgtaatgtcagaagagaatagcgcaggagagctgatttaccaagttcagtcacctgatgaaggggctctagtgactgccgctagaaattttgggttcatttttaaatcccggaccccagagaccataacaatagaagaattgggaacactagttacttatcaattacttgcctttttggatttcaacaacaccagaaaaaggatgtctgtcatagttcgaaacccagaaggacagataaagctttattccaaaggagcagatactattctgtttgaaaaacttcatccttccaatgaagtccttttgtctttgacgtcagaccacctcagtgaatttgcaggggaaggccttcggaccttggccatcgcatacagagacctggatgacaagtactttaaagagtggcataagatgcttgaagatgcgaatgctgccacagaagagagggatgaacgaatagctgggctatatgaagaaattgaaagagatttgatgctactaggtgccactgctgtagaagataagttacaggagggtgttattgaaacagttacaagtttatcactagccaatattaagatctgggtcctaacaggagacaaacaagaaactgccatcaacatcggttatgcctgcaacatgctgactgacgacatgaatgatgtgtttgtgatagcagggaataatgctgtggaagtgagagaagaactcaggaaagcaaaacaaaatttgtttggacaaaacagaaatttttccaatggccatgtagtttgtgaaaaaaagcagcagctggagttggattctattgtagaagaaaccataacaggagattatgccttaatcataaatggccacagtttggctcatgccctagaaagtgatgtcaagaatgatctcctagaacttgcttgcatgtgtaagactgtaatttgctgcagggtcactccactccagaaagcccaagtggtagagctggtgaagaagtacagaaatgctgttactttggccattggtgatggagccaatgatgtcagcatgattaaaagtgctcacattggtgttggcatcagcggccaggaaggattgcaagcagtcttagccagcgactattcatttgcacagtttagatatctccaaaggcttctccttgttcatggaaggtggtcttatttccgaatgtgcaaattcttatgctatttcttctataagaattttgcatttacacttgtgcatttctggtttggtttcttctgtggtttctcagcccagactgtttatgaccagtggttcatcaccctttttaacattgtttacacatcactgcctgttttagccatggggatttttgaccaggatgtgagtgaccagaacagcgtggactgtccccagctctacaaaccaggacagctgaatctgctttttaacaagcgtaaatttttcatttgcgtgttgcatggaatctacacctcattagtccttttcttcatcccctatggggccttttacaacgtggctggagaagatgggcaacatattgctgactaccagtcctttgcagttaccatggccacatctttggtcattgtggtcagtgtgcagatagccttggataccagttactggactttcattaatcacgtcttcatctgggggagcattgccatttatttctccattttatttacaatgcacagtaatggcatctttggcatcttcccaaaccagtttccatttgttggtaatgcacgacattccctgacccagaagtgcatctggcttgtaattctcttaacaacagtggcttcagttatgccagtggtggcattcagatttttgaaggtggatttatacccaaccctgagtgatcagatccgccggtggcagaaggctcaaaagaaggcaaggcctccaagtagccgaaggcctcggacccgcaggtcaagctcaagaaggtctggatatgcttttgctcaccaagaaggctatggagagcttatcacatctggaaaaaatatgcgagctaaaaatccacccccaacatcagggctggaaaagacacattataatagcactagctggattgaaaatttatgtaagaaaaccacagacaccgtgagcagctttagccaggataaaacagtgaaactgtgagtcaatatgaatttaaaccacgtagttatcttttcacttcaggtggagctgaaattctgctggctccagagtttgagatttgaggcaagaggtggggcaggcagattgcctcacttaacttaaatctgcggcagacaactgccagtgcccatcaaacaggagtgtgcgctatggaaaaccaggccagagggtcactgtctggtttgtgatttggtggacaaaacactcgctgttacaagtacagattttttttttttttaaatcaacctagataccaattgacctgaactttagaatcttatttatggagaaaaacttgtaaagctgcatattcactgaatggatcctcaggcggataaaagggtgcattttaaaggtatatatccaagctgaaaagcatgcctattgacagataaacatgtatctgtaagatcagcctttcccaaggtatacttttaaaatttaaagcgtgtactgtgttgctttcagactgagttgcatgtcactctttagtcttgatatctacctgtctgttcagccaggacaacaaatggcttccaagcctgaagaatacaaaagtgtgcttgtgtttctcatttttataccagtctagggacaaaggagactgaacatctttgcagcaggataggctggtaatttgatcaaatttattcaaaaagctctcagtctgtgtcatgtaaggacatgcttatgaaatgtgagagaggctcgccactaagtattctaaatacttttcaatggcttttctaacaacctcagtagtaatttgctgagcatcatccagaccattaatagaatcagcaaagcactggaatttcacactttaatgataatattccacatagtctatgggcaaatattttcaacatttccaatttttaaagcttcagaattgaagccaaacaaattaataaataattgttttaattactatttaaaaactcaggtttagattgtttaaaattagttgcttttgatactcagctgtcatgtttataattcaaacatgtagtaaacatatgtaggtaaggttgtttttttggagatgttgcagctcaaatttcagtccacatatgaatcatcagtgtattttccataaagtgattcgggcatatttgtgtgaaaacctcagttctgtcacttcttacctctataaacttggacgataatgtgccttctctgagactcagtttcttcctctgtaaaatgaggacatactacctacctcatgtggttggttgatgattgtctgtcaaagcacaaactctgaaattattaaaaacataattatttcataaacagatgagttaagttccagttaactcaacatcagtataacagagcaattggaagagaatatgaaaaaactggaatctaaatagtcagtgaggaaggctttgataaaatgaaattgccagaaagatataaaactggttagggtcctacagggaaataaaattataaccgtggaggtacatttctctaccagaaagcaaaaataaagcatcatgtcttaatggttttctacaaatcaacttctaattctacagagtccttaatctggtccctattaaattcttggtcagacaaagttacatttcccaagagagtcaggtgacacttgagtgagtttgatggataatgagctaatgtgatatctataggtcacaattttttaaaaccaaaattttcaagtctgggataatctttcctaaatgggatcaaatgaaataatatgtgtaaaagagtcaaatgcagtcctttaccatagtaactgcctatggacgttgtctttcccttacatgcctgcctacacttaaccagatgttggttttcaatgtctaatttgtcattagtttcaccacatttgctcactttttgtaacatttttgcaagatttgaaaactttcagtaaatgttttggcactattggtaaa

SEQ ID NO: 607 - protein, 1192 aa, Homo Sapiens
MFCSEKKLREVERIVKANDREYNEKFQYADNRIHTSKYNILTFLPINLFEQFQRVANAYFLCLLILQLIPEISSLTWFTTIVPLVLVITMTAVKDATDDYFRHKSDNQVNNRQSEVLINSKLQNEKWMNVKVGDIIKLENNQFVAADLLLLSSSEPHGLCYVETAELDGETNLKVRHALSVTSELGADISRLAGFDGIVVCEVPNNKLDKFMGILSWKDSKHSLNNEKIILRGCILRNTSWCFGMVIFAGPDTKLMQNSGKTKFKRTSIDRLMNTLVLWIFGFLICLGIILAIGNSIWESQTGDQFRTFLFWNEGEKSSVFSGFLTFWSYIIILNTVVPISLYVSVEVIRLGHSYFINWDRKMYYSRKAIPAVARTTTLNEELGQIEYIFSDKTGTLTQNIMTFKRCSINGRIYGEVHDDLDQKTEITQEKEPVDFSVKSQADREFQFFDHHLMESIKMGDPKVHEFLRLLALCHTVMSEENSAGELIYQVQSPDEGALVTAARNFGFIFKSRTPETITIEELGTLVTYQLLAFLDFNNTRKRMSVIVRNPEGQIKLYSKGADTILFEKLHPSNEVLLSLTSDHLSEFAGEGLRTLAIAYRDLDDKYFKEWHKMLEDANAATEERDERIAGLYEEIERDLMLLGATAVEDKLQEGVIETVTSLSLANIKIWVLTGDKQETAINIGYACNMLTDDMNDVFVIAGNNAVEVREELRKAKQNLFGQNRNFSNGHVVCEKKQQLELDSIVEETITGDYALIINGHSLAHALESDVKNDLLELACMCKTVICCRVTPLQKAQVVELVKKYRNAVTLAIGDGANDVSMIKSAHIGVGISGQEGLQAVLASDYSFAQFRYLQRLLLVHGRWSYFRMCKFLCYFFYKNFAFTLVHFWFGFFCGFSAQTVYDQWFITLFNIVYTSLPVLAMGIFDQDVSDQNSVDCPQLYKPGQLNLLFNKRKFFICVLHGIYTSLVLFFIPYGAFYNVAGEDGQHIADYQSFAVTMATSLVIVVSVQIALDTSYWTFINHVFIWGSIAIYFSILFTMHSNGIFGIFPNQFPFVGNARHSLTQKCIWLVILLTTVASVMPVVAFRFLKVDLYPTLSDQIRRWQKAQKKARPPSSRRPRTRRSSSRRSGYAFAHQEGYGELITSGKNMRAKNPPPTSGLEKTHYNSTSWIENLCKKTTDTVSSFSQDKTVKL

SEQ ID NO: 608 - DNA, 2909 bp, Homo Sapiens
gcactgagccggctcaggcagagacgcggcaccatggctagcaagaaagtctgcattgtaggctccgggaactggggctcagccatcgccaagatcgtgggtggcaatgcagcccagctggcacagtttgacccacgggtgaccatgtgggtatttgaggaagacattggaggcaaaaagctgactgagatcatcaacacgcagcatgagaatgtcaaatacctgccagggcacaagttgcccccaaatgtggtggctgtcccagatgtggtccaggctgcagaggatgctgacatcctgatctttgtggtgccccatcagttcatcggcaagatctgtgaccagctcaagggccatctgaaggcaaacgccactggcatatctcttattaagggggtagacgagggccccaatgggctgaagctcatctcggaagtgattggggagcgcctcggcatccccatgagtgtgctgatgggggccaacattgccagcgaggtggctgatgagaagttctgtgagacaaccattggctgcaaggacccggcccagggacaactcctgaaagagctgatgcagacaccaaacttccgtatcacagtggtgcaagaggtggacacagtagagatctgtggagccttaaagaatgtagtggccgtgggggctggcttctgtgatggcctgggctttggcgacaacaccaaggcggcagtgatccggctgggactcatggagatgatagccttcgccaagctcttctgcagtggccctgtgtcctctgccaccttcttggagagctgtggtgttgctgacctgatcactacctgctatggagggcggaaccggaaagtggctgaggcctttgcgcgtacaggaaagtccattgagcagctggagaaagagttgctgaatgggcagaaactgcaggggcccgagacagcccgggagctatacagcatcctccagcacaagggcctggtagacaagtttcccttgttcatggctgtgtacaaggtgtgctacgagggccagccagtgggtgaattcatccactgcctgcagaatcatccagaacatatgtgagtggggccagggcccaggccaggccgcttttttaccccagcggagaccagcagaagcctggggtacctagtcaccaggatctccaggactcccagggagcagagtcttctcatcttttcactggaggacaggaggctatggggcccagctacgcacctggagatcctgaactgtcaagccactggcagcctcatgccaccacatttgccagaaatgcagttgccctgtccctctccagatgtggggctttctccatatcctctgggaggggtggaatcaagccccagtgctgcctgcttggtggcgggggtgatgtatgtggagaagggttgggggagaggccggtagggcaggggctgctagtggctgtctcacatacaccagtaatcctgttaaagggctgaagaagtatcttagccacaggagcgatgaggcaaggattgtcagggaggggtctgggcttctgagctgatgcaggccccaaggacccctttgctgacctctgccaggacccacacagcttcgatggatctcagtgtttgttaacaaaatacaaagatctcaaacaaaccccttttagcttctcctagcaacatctgtgtcctcagaaacctctggttctcccccttccccctcccccaggctgccctggcacccaaattgctgccatgctggcatctgtagctcggtggcttgacattctccccagggacttcccggttcctagttctttgccagctcctccccactctgtgcgacctttccaagccttccctcaccctccccgccagcaccctctttggggagcaggaacttaatctgctgacagagctacacctttcataacaggctcagatcactcagctccctgtgacctttgtattcacccaggcttccttctcagtagctctagctgggggaggtgtcagctgggcccctcctgtgctatctccccagaggacatccctgactccacccctttcttcctcccaaactctgcacctcttcctcagctgctccagaccggccagggtaaccagctaaccatgcctggcatctggaagccagcaggccagagggtggcccaaaggctgatgaacggtagggaagggtgagcagattcctatgttggtgggcaccaatattccaagggcagctctctttgctgaatgagggccttctcgtgaggtactgacaacaccagcaactcgagagctgggaaactcaaggaggaggaagaaaatcaaaaccaccctactccctggggtgaggaaagaacaggaggggaggaggaggagtgtgctctgcacttgccttgctccagcatggggtggcagcagaggaatgtcacaggtcagcagcctaggcctccagctataaatagtccggagggcccgagaggctcccgcccgtccagcagggctgtcagcttcctgtgtggcagcacctggcacactggctctggccagcattatgctaaaaccctgttactctccaatgaaccagggaggcgggctcctctctgcgcctatcccttgagaattctgtcttaccagtgaagggtggggctgcccagatcaggcagcaggagtgaggggcacagtcaccccaggccttgctgagcccaggtctgggtactgagtgtccagagctgcctccccaggaggttaaggtgggggcaaaggggaagcttcaagcactttgcctacttttgttcactccccagtgcactgtgactcaggccttcccatcaggcctatttgtctacccaataaagcgtgttttttccagaaaaaaaaaaaaaaaaaaaaaaaaaaaaaaaaaaa

SEQ ID NO: 609 - protein, 349 aa, Homo Sapiens
MASKKVCIVGSGNWGSAIAKIVGGNAAQLAQFDPRVTMWVFEEDIGGKKLTEIINTQHENVKYLPGHKLPPNVVAVPDVVQAAEDADILIFVVPHQFIGKICDQLKGHLKANATGISLIKGVDEGPNGLKLISEVIGERLGIPMSVLMGANIASEVADEKFCETTIGCKDPAQGQLLKELMQTPNFRITVVQEVDTVEICGALKNVVAVGAGFCDGLGFGDNTKAAVIRLGLMEMIAFAKLFCSGPVSSATFLESCGVADLITTCYGGRNRKVAEAFARTGKSIEQLEKELLNGQKLQGPETARELYSILQHKGLVDKFPLFMAVYKVCYEGQPVGEFIHCLQNHPEHM

SEQ ID NO: 610 - DNA, 4772 bp, Homo Sapiens
ttgggcggagatgcctttaaaaaatcatccaccgcagcggtagaaacagttttgtttggctttatttatacggaatggtttttcagtgaaatgctgtcttgcttaaaagaagagatgcctccccaggagctcacccggcgactggccacagtgatcactcatgtcgatgaaattatgcagcaggaagtcagacccctgatggcggtggagataatagaacaacttcacagacaatttgccattctttcaggaggccgaggggaggatggcgcccccatcatcacgttcccagagttttcggggttcaaacacatcccagatgaagacttcctgaatgtcatgacctacctgactagcatccccagtgtggaggctgccagcattggattcattgttgttatcgacagacgaagagacaagtggagctccgtaaaggcatccttgacacgaatagctgtggcatttccaggaaacttacagctcatattcatccttcgtccatctcgctttatccagaggacattcactgacattggcattaaatactatcgaaatgagtttaaaacgaaagtgccgatcatcatggtaaactctgtctctgaccttcacggctacatcgacaaaagccaactgacccgggaattaggggggactttggaatatcgccacggtcagtgggtaaatcaccgcactgccatcgaaaactttgccttgaccttgaagaccactgcccagatgctgcagacgtttgggtcctgcctggccacagcagagctgcccagaagcatgctatccacggaagaccttctcatgtcccacacaaggcagcgggacaagctgcaggatgagctgaaattacttggaaagcaggggaccacattgctgtcatgcatccaagaaccagcaaccaaatgtcccaacagcaaactcaatctcaaccaacttgagaatgtaactaccatggaaaggttattagttcaactggatgaaacagaaaaagcctttagtcacttttggtctgagcatcatctgaagcttaaccagtgcctacaactacagcattttgagcacgatttttgtaaggctaagcttgccctggataatttgctggaagagcaagcagagtttacaggcattggagacagcgtgatgcacgtggagcagattcttaaggaacacaaaaaactggaggaaaaaagccaggagcccctggaaaaggcccagctgctggcactggttggggaccagctcatccaaagccaccattatgcagcagatgccatcaggccccggtgtgtggagctcaggcacctctgtgacgatttcatcaatggaaacaagaaaaaatgggacattttaggaaagtccttagagtttcatagacagctggacaaggtcagccaatggtgtgaggcaggaatctacctcttggcttcccaagctgtagacaagtgccagtctcgagaaggggttgatatcgccttgaacgacattgcgacattcctgggcacagtcaaggagtacccgttgctcagccccaaggagttttacaacgagtttgagttgctgctcaccctcgatgcaaaggccaaagcccagaaagttttgcagaggctggatgatgtccaggaaatatttcacaagaggcaagtgagtctgatgaaactggcagccaaacagactcgtccagtgcaacctgtggccccacatcctgagtcttcaccaaaatgggtgtcatcaaaaaccagccagccctccacctcggtccctctagctcgtcctctgagaacgtctgaggaaccttatacggagacagagttgaactcccggggaaaggaagatgatgagactaaatttgaagtcaagagtgaagaaatctttgaaagccatcatgaaagggggaaccctgagctggagcagcaggccaggctcggagacctttccccccgcaggcgcattatacgtgacttgcttgagactgaagagatttacataaaagagattaaaagcataattgatggatatatcactccaatggattttatttggctaaagcatctaattccagatgttcttcagaataacaaggactttctctttgggaatattagagaactttacgaatttcacaacaggacttttctaaaagagttggaaaagtgtgctgagaaccctgaacttctggcacattgctttctcaagagaaaagaagatcttcagatatattttaaataccataagaatctgccccgagctagggcaatctggcaagagtgtcaagactgcgcctactttggggtatgccagcgccaactggatcacaatctccctctttttaagtatctcaaaggaccaagccagagacttataaaataccagatgctgttgaagggtctgctggatttcgagtctcctgaagatatggagatagacccaggtgaactaggaggctcggctaaggatgggccaaagagaaccaaagattcagcattctcaactgaactacaacaagctttggcagtgatagaggatttgatcaagtcctgtgagttggctgtggacctagcagcagtgactgaatgtccggacgatattggaaaactaggcaagctgttgctgcacggccctttcagcgtctggacaattcacaaggatcgttataaaatgaaggatttgattcgatttaaacccagccagaggcaaatctacctatttgaaaggggaatagtgttctgtaagatacgaatggagcctggggaccagggattatctcctcattacagcttcaagaagaccatgaagctgatgacactttcaattcgccagcttggaagggggagccatagaaagtttgagattgccagtcgaaatggacttgagaaatacatcctgcaggcagcttcaaaagaaatcagagactgttggttttcagaaataagtaaattattgatggaacaacaaaataatatcaaagaccaaggaaatccacagtttgaaatgagcacgagcaaaggcagtggagcaggatccggaccatggattaaaaatatggaaagagctaccactagcaaggaagacccggcctccagcacaggagggattaaaggctgctccagcagggagtttagctccatggacacctttgaagactgtgaaggcgcagaagacatggaaaaggagagcagtgctctgagtctcgcgggccttttccagtcggacgacagtcacgaaacctgttcctccaaatctgctttcctggagaggggagaaagcagccagggagaaaaagaagaacgcgatgaggaggaaacggcgacccgcagcaccgaggaggagcgcgctggggcgtccacgggccggctggctcctgcgggggcgacggctggtttccaggcgagggcgctgcgcccgaggacctccgcccaggagagctgacctccctgcggacgcccccgctcctcggctccagagcgcccgcattcccgggagaggcggtgtgggggcccgggccctgcccagctacgcagaaagcagccggagcctcggcggcggcagaaaggggacaaccagggcctcctccgaggagcccgaggggtgtcctgggtgcgcgcctagctccgcacgggggacctcggagctgctctaaggcgcctgcagaggcgagcagagcccgcagcccacgccttctcgaccgcgcacttcgacattcggagccgggcaattctttgctgcgtgggcttctctgtgctcccacggtaggatgtttagtagcacccctggcctctacccactaggtgccaggaatgcgccaccccatcctccaccccgcccccaaatcgtgacaatcaaaaatgcctgcagacacgcccgcatttctccagggcggggtgggaatcggttgagagccgcttagcccgagccttggaggagccggagccgctcaaacccggcgggggccgcagactgggagctcccggtccgcctcccagcatccctgcgagcgttcatggggtgttcgtgttagtgccaagattgcttcgttgtagagagagttcgttccaagttactttctgaggtattttatgtatcgatttattagtttttaaatgagttttgttagtttcagttgtattttatttttagttttattagttgattttcatttctttgtagctttctggttatttaattttatagtttcagttactggtttatagttactttattttcaaagttatttagttgttcattttcagttatttatatgtagttgttttgttttaggagttacagatgttcaaattaatttgcttggaatttatttatttatttatttatttatttttcgagacggagtctcgctctgtcgcccaggctggagtgcagtggtgtgatctcggctcactgcaaaccgcctcccgggttcacgccattctcctgcctcagcctcctgagtagctgggactacaggcgcccgccaccacgcccggctaattttttatttggatttttagtagagacggggtttccccgtgttagccaggatggtctcgatctcctgacctcgtgatccccctgcctcggcctcccaaagtgctgggattacaggcgtgagccaccgcgcccagccggaatttatttttaattatctttacaattattatctgagttatttaccttcatagttatttcactttatcttattggagtttttgagttatttatttttacagtaacttatttgactattaaacactcactggaagttcatg

SEQ ID NO: 611 - protein, 1114 aa, Homo Sapiens
MLSCLKEEMPPQELTRRLATVITHVDEIMQQEVRPLMAVEIIEQLHRQFAILSGGRGEDGAPIITFPEFSGFKHIPDEDFLNVMTYLTSIPSVEAASIGFIVVIDRRRDKWSSVKASLTRIAVAFPGNLQLIFILRPSRFIQRTFTDIGIKYYRNEFKTKVPIIMVNSVSDLHGYIDKSQLTRELGGTLEYRHGQWVNHRTAIENFALTLKTTAQMLQTFGSCLATAELPRSMLSTEDLLMSHTRQRDKLQDELKLLGKQGTTLLSCIQEPATKCPNSKLNLNQLENVTTMERLLVQLDETEKAFSHFWSEHHLKLNQCLQLQHFEHDFCKAKLALDNLLEEQAEFTGIGDSVMHVEQILKEHKKLEEKSQEPLEKAQLLALVGDQLIQSHHYAADAIRPRCVELRHLCDDFINGNKKKWDILGKSLEFHRQLDKVSQWCEAGIYLLASQAVDKCQSREGVDIALNDIATFLGTVKEYPLLSPKEFYNEFELLLTLDAKAKAQKVLQRLDDVQEIFHKRQVSLMKLAAKQTRPVQPVAPHPESSPKWVSSKTSQPSTSVPLARPLRTSEEPYTETELNSRGKEDDETKFEVKSEEIFESHHERGNPELEQQARLGDLSPRRRIIRDLLETEEIYIKEIKSIIDGYITPMDFIWLKHLIPDVLQNNKDFLFGNIRELYEFHNRTFLKELEKCAENPELLAHCFLKRKEDLQIYFKYHKNLPRARAIWQECQDCAYFGVCQRQLDHNLPLFKYLKGPSQRLIKYQMLLKGLLDFESPEDMEIDPGELGGSAKDGPKRTKDSAFSTELQQALAVIEDLIKSCELAVDLAAVTECPDDIGKLGKLLLHGPFSVWTIHKDRYKMKDLIRFKPSQRQIYLFERGIVFCKIRMEPGDQGLSPHYSFKKTMKLMTLSIRQLGRGSHRKFEIASRNGLEKYILQAASKEIRDCWFSEISKLLMEQQNNIKDQGNPQFEMSTSKGSGAGSGPWIKNMERATTSKEDPASSTGGIKGCSSREFSSMDTFEDCEGAEDMEKESSALSLAGLFQSDDSHETCSSKSAFLERGESSQGEKEERDEEETATRSTEEERAGASTGRLAPAGATAGFQARALRPRTSAQES

SEQ ID NO: 612 - DNA, 8306 bp, Homo Sapiens
cactgctctgactgcgtcctccccaggctgaagtgtcctcaggtttcatgtggatttgcccagtaatggatggctccaccgaggccaggttggggaagttcagcctcgaggacactaggggacgaaaaacttcaaaaagaagactctttttattaatattttggcgttctttttggagaggaacttttgggatgtagcctttacctgtttcctgaatttgacatccaaaaagccttttggaaaacaccattctaaatttatcctgttctgaatcatcatcgcttctgatagatgcagttgcttgctgacatcgtgatctttgattttgtacaacgctatttgggctaacttttgggattttactttgtgcttagaatttgaaagtagtattcattggaaagagactccaagaaaatactcgaagacatcaaaagctggattcgagggtataacgtgttttgttttgttttttaaattagaaaaataaggaattgcagtgtgattttctttccccctttaacttagaggaacgaggattatacagaaatttgaaatttcaacaagaaaaacttaagcttccttggattcccacgtcaaaggaaagtttcaagctttcagaaggagttctcactcgaagataaagaacagctcgctaaccacgaaagaggaatcgatgctcagcttttagttgcacttcctaaagttgcagaattaagacaaatctttgaaccaaagaagaaagaattcttagaaatgaaaagaaaagaaagaattgccaggcgcctggaagggattgaaaatgacactcagcccatcctcttgcagagctgcacaggattggtgactcaccgcctgctggaggaagacacccctcgatacatgagagccagcgaccctgccagcccccacatcggccgatcaaatgaagaggaggaaacttctgattcttctctagaaaagcaaactcgatccaaatactgcacagaaacctccggtgtccacggtgactcaccctatggttcgggtaccatggacacccacagtctggagtccaaagccgaaagaattgcaaggtacaaagcagaaagaaggcgacagctggcagagaagtatgggctgactctggatcccgaggccgactccgagtatttatcccgctataccaagtccaggaaggagcctgatgctgtcgagaagcggggaggaaaaagtgacaaacaggaagagtcaagcagagatgctagttctctgtaccccgggaccgagacgatggggctcaggacctgtgccggtgaatccaaggactatgccctccatgtgggtgacggctcttccgacccggaggtgctgctgaacatagaaaaccaaagacgaggtcaagagctgagtgccacccggcaggcccatgacctgtccccagcagccgagagttcctcgaccttctctttctctgggcgagactcctccttcactgaagtgccacggtcccccaagcacgcccacagctcctccctgcagcaggcagcctcccggagcccctcctttggtgacccacagctatcccctgaggcccgacccagtacagggaaacccaaacatgagtggtttctccagaaagattccgaaggggacacaccttcacttatcaactggccttccagagttaaagttagagaaaaattggtgaaagaggaaagtgctcgaaacagccctgaactcgcctcagagtccgtaactcagaggagacaccagccagcgccagtccattacgtgtcatttcagtctgagcactcagcctttgatagggtccccagcaaggcagcaggctctacacgacagccaatccgtggctatgtccaacccgcagataccggtcacaccgccaagctagtgacgccagaaaccccagaaaatgcatctgagtgtagctgggtagcatcagccacccagaatgtccccaaacctcccagcttgacggttctagaaggtgacggaagggatagcccagttctccatgtctgcgagtcaaaagcagaagaagaagaaggggaaggagaaggagaagaaaaagaagaagatgtgtgcttcactgaagctctcgagcaaagcaagaaaaccctactggctttggagggtgatgggctagtgagaagcccagaagatccctctagaaatgaggactttggtaagcctgctgtgagcacagtcaccttagagcatcagaaggaactggaaaacgtggcacaaccccctcaagctccgcaccagcccactgagaggacaggcaggagcgagatggttctctacattcaaagtgagcctgtgtcccaagacgccaaaccaactggtcacaacagggaagcctcgaaaaagcgcaaggtccgtacccgctctctgtcagatttcacaggcccccctcagctccaggccttgaagtataaggacccagcttccaggagagagctggagctgcccagctccaagaccgaagggccttatggggagatcagcatgctggacacaaaagtctctgtcgcccagctccgaagtgcgttcctggcatctgccaacgcctgcaggagacctgaactcaaatcacgggtggagaggtcggctgaaggacctggcttgcccaccggtgtggaacgggagagagggtcccggaaaccaagacgctatttttctcctggtgaaagtagaaaaacttccgagagatttagaacccaacctataacttcagcagaacgaaaggaatcggataggtgcacttcacattcagaaacgccaactgtcgatgatgaagaaaaggtggatgaacgagccaagctgagcgtcgccgccaagaggttgcttttcagggagatggaaaaatcttttgatgaacaaaatgttccaaagcgacgctcaagaaacacagctgtggagcagaggctacgccgtctgcaggacaggtccctcacccagcccatcaccactgaagaggtggtcatcgcagccactgaacctatccccgcttcgtgttctgggggcacccaccctgtaatggcgagacttcctagccccactgtagctaggagcgctgtgcagcctgccagattgcaggcctctgctcaccaaaaggccttagccaaggaccagacaaatgagggcaaagagcttgctgagcaaggagaacctgattcctccactctaagcttggccgaaaagttggccttgtttaacaaattgtcccagccagtctcaaaagcgatttctacccggaacagaatagacacgagacagaggagaatgaacgctcgctatcaaactcagccagtcacactgggagaggtggagcaggtgcagagtggaaagctcattcctttctcacctgccgtgaacacatcagtgtctaccgtagcatccacggttgctccaatgtatgccggagatcttcgcacaaagccacctcttgaccacaatgcaagtgccactgactataagttttcttcttcaatagaaaattcggactctccagttagaagcattctgaaatcgcaagcttggcagcctttggtagagggtagcgagaacaagggaatgttgagagaatatggagagacagaaagcaagagagctttgacaggtcgagacagtgggatggagaagtatgggtcctttgaggaagcagaagcatcctaccccatcctgaaccgagccagggaaggagacagccataaggaatctaaatatgctgttcccagaagaggaagcctggaacgggcgaaccctcccatcacccacctcggggatgaaccgaaggaattttccatggctaaaatgaatgcacaaggaaacttggacttgagggacaggctgccctttgaagagaaggtggaggtggagaatgttatgaaaaggaagttttcactaagagcggcagagttcggggagcccacttccgagcagacggggacagctgctgggaaaactattgctcaaaccacagcccccgtgtcctggaagccccaggattcttcggaacagccacaggagaagctctgcaagaatccatgtgcgatgtttgctgctggagagatcaaaacgccgacaggggagggccttcttgactcacccagcaaaaccatgtctattaaagaaagattggcactgttgaagaaaagcggggaggaagattggagaaacagactcagcaggaggcaggagggcggcaaggcgccggccagcagcctgcacacccaggaagcagggcggtccctcatcaagaagcgggtcacagaaagtcgagagagccaaatgacgattgaggagaggaagcagctcatcactgtgagagaggaggcctggaagacgagaggcagaggagcggccaacgactcgacccagttcactgtggctggcaggatggtgaagaaaggtttggcgtcacctactgccataaccccagtagcctcacccatttgcggtaaaacaagaggcaccacacccgtttccaaacccctggaagatatcgaagccagaccagatatgcagttagaatcggacctgaagttggacaggctggaaacctttctaagaaggctgaataacaaagttggcgggatgcacgaaacggtgctcactgtcaccggcaaatctgtgaaggaggtgatgaagccagatgatgatgaaacctttgccaaattttaccgcagcgtggattataatatgccaagaagtcctgtggagatggatgaggacttcgatgtcattttcgatccttatgcacccaaattgacgtcttccgtggccgagcacaagcgggcagttaggcccaagcgccgggttcaggcctccaaaaaccccctgaaaatgctggcggcaagagaagatctccttcaggaatacactgagcagagattaaacgttgccttcatggagtcaaagcggatgaaagtagaaaagatgtcttccaactccaacttctcagaagtcaccctggcgggtttagccagtaaagaaaacttcagcaacgtcagcctgcggagcgtcaacctgacggaacagaactctaacaacagcgccgtgccctacaagaggctgatgctgttgcagattaaaggaagaagacatgtgcagaccaggctggtggaacctcgagcttcggcgctcaacagtggggactgcttcctcctgctctctccccactgctgcttcctgtgggtaggagagtttgcaaacgtcatagaaaaggcgaaggcctcagaacttgcaactttaattcagacaaagagggaacttggttgtagagctacttatatccaaaccattgaagaaggaattaatacacacactcatgcagccaaagacttctggaagcttctgggtggccaaaccagttaccaatctgctggagacccaaaagaagatgaactctatgaagcagccataatagaaactaactgcatttaccgtctcatggatgacaaacttgttcctgatgacgactactgggggaaaattccgaagtgctcccttctgcaacccaaagaggtactggtgtttgattttggtagtgaagtttacgtatggcatgggaaagaagtcacattagcacaacgaaaaatagcatttcagctggcaaagcacttatggaatggaacctttgactatgagaactgtgacatcaatcccctggatcctggagaatgcaatccgcttatccccagaaaaggacaggggcggcccgactgggcgatatttgggagacttactgaacacaatgagacgattttgttcaaagagaagtttctggattggacggaactgaagagatcgaatgagaagaaccccggggaacttgcccagcacaaggaagaccccaggactgatgtcaaggcatacgatgtgacacggatggtgtccatgccccagacgacagcaggcaccatcctggacggagtgaacgtcggccgtggctatggcctggtggaaggacacgacaggaggcagtttgagatcaccagcgtttccgtggatgtctggcacatcctggaattcgactatagcaggctccccaaacaaagcatcgggcagttccatgagggggatgcctatgtggtcaagtggaagttcatggtgagcacggcagtgggaagtcgccagaagggagagcactcggtgagggcagccggcaaagagaagtgcgtctacttcttctggcaaggccggcactccaccgtgagtgagaagggcacgtcggcgctgatgacggtggagctggacgaggaaaggggggcccaggtccaggttctccagggaaaggagcccccctgtttcctgcagtgtttccagggggggatggtggtgcactcggggaggcgggaagaggaagaagaaaatgtgcaaagtgagtggcggctgtactgcgtgcgtggagaggtgcccgtggaagggaatttgctggaagtggcctgtcactgtagcagcctgaggtccagaacttccatggtggtgcttaacgtcaacaaggccctcatctacctgtggcacggatgcaaagcccaggcccacacgaaggaggtcggaaggaccgctgcgaacaagatcaaggaacaatgtcccctggaagcaggactgcatagtagcagcaaagtcacaatacacgagtgtgatgaaggctccgagccactcggattctgggatgccttaggaaggagagacaggaaagcctacgattgcatgcttcaagatcctggaagttttaacttcgcgccccgcctgttcatcctcagcagctcctctggggattttgcagccacagagtttgtgtaccctgcccgagccccctctgtggtcagttccatgcccttcctgcaggaagatctgtacagcgcgccccagccagcacttttccttgttgacaatcaccacgaggtgtacctctggcaaggctggtggcccatcgagaacaagatcactggttccgcccgcatccgctgggcctccgaccggaagagtgcgatggagactgtgctccagtactgcaaaggaaaaaatctcaagaaaccagcccccaagtcttaccttatccacgctggtctggagcccctgacattcaccaatatgtttcccagctgggagcacagagaggacatcgctgagatcacagagatggacacggaagtttccaatcagatcaccctcgtggaagacgtcttagccaagctctgtaaaaccatttacccgctggccgacctcctggccaggccactcccggagggggtcgatcctctgaagcttgagatctatctcaccgacgaagacttcgagtttgcactagacatgacgagggatgaatacaacgccctgcccgcctggaagcaggtgaacctgaagaaagcaaaaggcctgttctgagtggggagacgccagaggagcctcacggtcacgtccaacaacaccactgcaccagggaaatggatatatatttttggactggtgtttttcacaaagtatttttcaatcagagttttcagaacctgacattgttaaagatactgcttgtcccggagttgtgtattttgtaaatgttcaagggaactgtttggaaacttctttccaccattcaggaggttatcagaattaataaaagtatctgttatgtgcacttaagccgcagctgctatagatagcactgccttcttgttccagctaggcaatgccttttttttttttttttgaagcagttctctttataaagtgttattttgatagtttgtggattctaaaatatatatatatttatataaacaccatataagtcaaatatgtatttaacaaagcaatatgtattcattcactttcaagatttgttttggtgtcaaaataacatgaaaaggtagatggagttgcttctgttgaattagctctgccaccaatatgtatcttcatacacgtttggaaatgtttcctgcagcattaggtatgacttgttctgagtactgcttccggtgctaaaatgaacaaagaatttgtacttaatggcatggactctggagaatctatgcgaatcaacctttctaccttaatatctccccaaaaatgtatagtgccttgtttttatgtacagtttatatacagaaaagtttgctctgcatttttgatgatggtttggaacattatctacaattttactctcaaatagtcaaaataaaaacatctcaatttctaataccggttgtaaacagtacacatgtcattttgtgatataggactcccaaataaaagtatcagaataaacacaacaattaactggtaaaaaaaaa

SEQ ID NO: 613 - protein, 2214 aa, Homo Sapiens
MKRKERIARRLEGIENDTQPILLQSCTGLVTHRLLEEDTPRYMRASDPASPHIGRSNEEEETSDSSLEKQTRSKYCTETSGVHGDSPYGSGTMDTHSLESKAERIARYKAERRRQLAEKYGLTLDPEADSEYLSRYTKSRKEPDAVEKRGGKSDKQEESSRDASSLYPGTETMGLRTCAGESKDYALHVGDGSSDPEVLLNIENQRRGQELSATRQAHDLSPAAESSSTFSFSGRDSSFTEVPRSPKHAHSSSLQQAASRSPSFGDPQLSPEARPSTGKPKHEWFLQKDSEGDTPSLINWPSRVKVREKLVKEESARNSPELASESVTQRRHQPAPVHYVSFQSEHSAFDRVPSKAAGSTRQPIRGYVQPADTGHTAKLVTPETPENASECSWVASATQNVPKPPSLTVLEGDGRDSPVLHVCESKAEEEEGEGEGEEKEEDVCFTEALEQSKKTLLALEGDGLVRSPEDPSRNEDFGKPAVSTVTLEHQKELENVAQPPQAPHQPTERTGRSEMVLYIQSEPVSQDAKPTGHNREASKKRKVRTRSLSDFTGPPQLQALKYKDPASRRELELPSSKTEGPYGEISMLDTKVSVAQLRSAFLASANACRRPELKSRVERSAEGPGLPTGVERERGSRKPRRYFSPGESRKTSERFRTQPITSAERKESDRCTSHSETPTVDDEEKVDERAKLSVAAKRLLFREMEKSFDEQNVPKRRSRNTAVEQRLRRLQDRSLTQPITTEEVVIAATEPIPASCSGGTHPVMARLPSPTVARSAVQPARLQASAHQKALAKDQTNEGKELAEQGEPDSSTLSLAEKLALFNKLSQPVSKAISTRNRIDTRQRRMNARYQTQPVTLGEVEQVQSGKLIPFSPAVNTSVSTVASTVAPMYAGDLRTKPPLDHNASATDYKFSSSIENSDSPVRSILKSQAWQPLVEGSENKGMLREYGETESKRALTGRDSGMEKYGSFEEAEASYPILNRAREGDSHKESKYAVPRRGSLERANPPITHLGDEPKEFSMAKMNAQGNLDLRDRLPFEEKVEVENVMKRKFSLRAAEFGEPTSEQTGTAAGKTIAQTTAPVSWKPQDSSEQPQEKLCKNPCAMFAAGEIKTPTGEGLLDSPSKTMSIKERLALLKKSGEEDWRNRLSRRQEGGKAPASSLHTQEAGRSLIKKRVTESRESQMTIEERKQLITVREEAWKTRGRGAANDSTQFTVAGRMVKKGLASPTAITPVASPICGKTRGTTPVSKPLEDIEARPDMQLESDLKLDRLETFLRRLNNKVGGMHETVLTVTGKSVKEVMKPDDDETFAKFYRSVDYNMPRSPVEMDEDFDVIFDPYAPKLTSSVAEHKRAVRPKRRVQASKNPLKMLAAREDLLQEYTEQRLNVAFMESKRMKVEKMSSNSNFSEVTLAGLASKENFSNVSLRSVNLTEQNSNNSAVPYKRLMLLQIKGRRHVQTRLVEPRASALNSGDCFLLLSPHCCFLWVGEFANVIEKAKASELATLIQTKRELGCRATYIQTIEEGINTHTHAAKDFWKLLGGQTSYQSAGDPKEDELYEAAIIETNCIYRLMDDKLVPDDDYWGKIPKCSLLQPKEVLVFDFGSEVYVWHGKEVTLAQRKIAFQLAKHLWNGTFDYENCDINPLDPGECNPLIPRKGQGRPDWAIFGRLTEHNETILFKEKFLDWTELKRSNEKNPGELAQHKEDPRTDVKAYDVTRMVSMPQTTAGTILDGVNVGRGYGLVEGHDRRQFEITSVSVDVWHILEFDYSRLPKQSIGQFHEGDAYVVKWKFMVSTAVGSRQKGEHSVRAAGKEKCVYFFWQGRHSTVSEKGTSALMTVELDEERGAQVQVLQGKEPPCFLQCFQGGMVVHSGRREEEEENVQSEWRLYCVRGEVPVEGNLLEVACHCSSLRSRTSMVVLNVNKALIYLWHGCKAQAHTKEVGRTAANKIKEQCPLEAGLHSSSKVTIHECDEGSEPLGFWDALGRRDRKAYDCMLQDPGSFNFAPRLFILSSSSGDFAATEFVYPARAPSVVSSMPFLQEDLYSAPQPALFLVDNHHEVYLWQGWWPIENKITGSARIRWASDRKSAMETVLQYCKGKNLKKPAPKSYLIHAGLEPLTFTNMFPSWEHREDIAEITEMDTEVSNQITLVEDVLAKLCKTIYPLADLLARPLPEGVDPLKLEIYLTDEDFEFALDMTRDEYNALPAWKQVNLKKAKGLF

SEQ ID NO: 614 - DNA, 1796 bp, Homo Sapiens
ccttttcccctgcctgcccttcgggcacctcaggaaggcaccttcctctgtcagaatggccaccatggtaccatccgtgttgtggcccagggcctgctggactctgctggtctgctgtctgctgaccccaggtgtccaggggcaggagttccttttgcgggtggagccccagaaccctgtgctctctgctggagggtccctgtttgtgaactgcagtactgattgtcccagctctgagaaaatcgccttggagacgtccctatcaaaggagctggtggccagtggcatgggctgggcagccttcaatctcagcaacgtgactggcaacagtcggatcctctgctcagtgtactgcaatggctctcagataacaggctcctctaacatcaccgtgtacaggctcccggagcgtgtggagctggcacccctgcctccttggcagccggtgggccagaacttcaccctgcgctgccaagtggaggatgggtcgccccggaccagcctcacggtggtgctgcttcgctgggaggaggagctgagccggcagcccgcagtggaggagccagcggaggtcactgccactgtgctggccagcagagacgaccacggagcccctttctcatgccgcacagaactggacatgcagccccaggggctgggactgttcgtgaacacctcagccccccgccagctccgaacctttgtcctgcccgtgacccccccgcgcctcgtggccccccggttcttggaggtggaaacgtcgtggccggtggactgcaccctagacgggctttttccagcctcagaggcccaggtctacctggcgctgggggaccagatgctgaatgcgacagtcatgaaccacggggacacgctaacggccacagccacagccacggcgcgcgcggatcaggagggtgcccgggagatcgtctgcaacgtgaccctagggggcgagagacgggaggcccgggagaacttgacggtctttagcttcctaggacccattgtgaacctcagcgagcccaccgcccatgaggggtccacagtgaccgtgagttgcatggctggggctcgagtccaggtcacgctggacggagttccggccgcggccccggggcagccagctcaacttcagctaaatgctaccgagagtgacgacggacgcagcttcttctgcagtgccactctcgaggtggacggcgagttcttgcacaggaacagtagcgtccagctgcgagtcctgtatggtcccaaaattgaccgagccacatgcccccagcacttgaaatggaaagataaaacgagacacgtcctgcagtgccaagccaggggcaacccgtaccccgagctgcggtgtttgaaggaaggctccagccgggaggtgccggtggggatcccgttcttcgtcaacgtaacacataatggtacttatcagtgccaagcgtccagctcacgaggcaaatacaccctggtcgtggtgatggacattgaggctgggagctcccactttgtccccgtcttcgtggcggtgttactgaccctgggcgtggtgactatcgtactggccttaatgtacgtcttcagggagcaccaacggagcggcagttaccatgttagggaggagagcacctatctgcccctcacgtctatgcagccgacagaagcaatgggggaagaaccgtccagagctgagtgacgctgggatccgggatcaaagttggcgggggcttggctgtgccctcagattccgcaccaataaagccttcaaactccctaaaaaaaaaaaaaaaaaa

SEQ ID NO: 615 - protein, 547 aa, Homo Sapiens
MATMVPSVLWPRACWTLLVCCLLTPGVQGQEFLLRVEPQNPVLSAGGSLFVNCSTDCPSSEKIALETSLSKELVASGMGWAAFNLSNVTGNSRILCSVYCNGSQITGSSNITVYRLPERVELAPLPPWQPVGQNFTLRCQVEDGSPRTSLTVVLLRWEEELSRQPAVEEPAEVTATVLASRDDHGAPFSCRTELDMQPQGLGLFVNTSAPRQLRTFVLPVTPPRLVAPRFLEVETSWPVDCTLDGLFPASEAQVYLALGDQMLNATVMNHGDTLTATATATARADQEGAREIVCNVTLGGERREARENLTVFSFLGPIVNLSEPTAHEGSTVTVSCMAGARVQVTLDGVPAAAPGQPAQLQLNATESDDGRSFFCSATLEVDGEFLHRNSSVQLRVLYGPKIDRATCPQHLKWKDKTRHVLQCQARGNPYPELRCLKEGSSREVPVGIPFFVNVTHNGTYQCQASSSRGKYTLVVVMDIEAGSSHFVPVFVAVLLTLGVVTIVLALMYVFREHQRSGSYHVREESTYLPLTSMQPTEAMGEEPSRAE

SEQ ID NO: 616 - DNA, 3385 bp, Homo Sapiens
aagcccctggctgtttatactccggagggtgtccccgtgcgtcatcggtggagtggaccaaaactggtgatctgtttgccctgtgtgaccttgcccagaaccctgctgactgagagaacacatctgctggaagtcctctgggattcaaggtacagggaatgaagagtagttttacagaaaaaagaggacaatattgggatcacctttgacctttccatttggaaataatattttctattgtgttatagaaaggtgggaagctttcatccagaacaatgaatttcataaaggacaatagccgagcccttattcaaagaatgggaatgactgttataaagcaaatcacagatgacctatttgtatggaatgttctgaatcgcgaagaagtaaacatcatttgctgcgagaaggtggagcaggatgctgctagagggatcattcacatgattttgaaaaagggttcagagtcctgtaacctctttcttaaatcccttaaggagtggaactatcctctatttcaggacttgaatggacaaagtctttttcatcagacatcagaaggagacttggacgatttggctcaggatttaaaggacttgtaccataccccatcttttctgaacttttatccccttggtgaagatattgacattatttttaacttgaaaagcaccttcacagaacctgtcctgtggaggaaggaccaacaccatcaccgcgtggagcagctgaccctgaatggcctcctgcaggctcttcagagcccctgcatcattgaaggggaatctggcaaaggcaagtccactctgctgcagcgaattgccatgctctggggctccggaaagtgcaaggctctgaccaagttcaaattcgtcttcttcctccgtctcagcagggcccagggtggactttttgaaaccctctgtgatcaactcctggatatacctggcacaatcaggaagcagacattcatggccatgctgctgaagctgcggcagagggttcttttccttcttgatggctacaatgaattcaagccccagaactgcccagaaatcgaagccctgataaaggaaaaccaccgcttcaagaacatggtcatcgtcaccactaccactgagtgcctgaggcacatacggcagtttggtgccctgactgctgaggtgggggatatgacagaagacagcgcccaggctctcatccgagaagtgctgatcaaggagcttgctgaaggcttgttgctccaaattcagaaatccaggtgcttgaggaatctcatgaagacccctctctttgtggtcatcacttgtgcaatccagatgggtgaaagtgagttccactctcacacacaaacaacgctgttccataccttctatgatctgttgatacagaaaaacaaacacaaacataaaggtgtggctgcaagtgacttcattcggagcctggaccactgtggagacctagctctggagggtgtgttctcccacaagtttgatttcgaactgcaggatgtgtccagcgtgaatgaggatgtcctgctgacaactgggctcctctgtaaatatacagctcaaaggttcaagccaaagtataaattctttcacaagtcattccaggagtacacagcaggacgaagactcagcagtttattgacgtctcatgagccagaggaggtgaccaaggggaatggttacttgcagaaaatggtttccatttcggacattacatccacttatagcagcctgctccggtacacctgtgggtcatctgtggaagccaccagggctgttatgaagcacctcgcagcagtgtatcaacacggctgccttctcggactttccatcgccaagaggcctctctggagacaggaatctttgcaaagtgtgaaaaacaccactgagcaagaaattctgaaagccataaacatcaattcctttgtagagtgtggcatccatttatatcaagagagtacatccaaatcagccctgagccaagaatttgaagctttctttcaaggtaaaagcttatatatcaactcagggaacatccccgattacttatttgacttctttgaacatttgcccaattgtgcaagtgccctggacttcattaaactggacttttatgggggagctatggcttcatgggaaaaggctgcagaagacacaggtggaatccacatggaagaggccccagaaacctacattcccagcagggctgtatctttgttcttcaactggaagcaggaattcaggactctggaggtcacactccgggatttcagcaagttgaataagcaagatatcagatatctggggaaaatattcagctctgccacaagcctcaggctgcaaataaagagatgtgctggtgtggctggaagcctcagtttggtcctcagcacctgtaagaacatttattctctcatggtggaagccagtcccctcaccatagaagatgagaggcacatcacatctgtaacaaacctgaaaaccttgagtattcatgacctacagaatcaacggctgccgggtggtctgactgacagcttgggtaacttgaagaaccttacaaagctcataatggataacataaagatgaatgaagaagatgctataaaactagctgaaggcctgaaaaacctgaagaagatgtgtttatttcatttgacccacttgtctgacattggagagggaatggattacatagtcaagtctctgtcaagtgaaccctgtgaccttgaagaaattcaattagtctcctgctgcttgtctgcaaatgcagtgaaaatcctagctcagaatcttcacaatttggtcaaactgagcattcttgatttatcagaaaattacctggaaaaagatggaaatgaagctcttcatgaactgatcgacaggatgaacgtgctagaacagctcaccgcactgatgctgccctggggctgtgacgtgcaaggcagcctgagcagcctgttgaaacatttggaggaggtcccacaactcgtcaagcttgggttgaaaaactggagactcacagatacagagattagaattttaggtgcattttttggaaagaaccctctgaaaaacttccagcagttgaatttggcgggaaatcgtgtgagcagtgatggatggcttgccttcatgggtgtatttgagaatcttaagcaattagtgttttttgactttagtactaaagaatttctacctgatccagcattagtcagaaaacttagccaagtgttatccaagttaacttttctgcaagaagctaggcttgttgggtggcaatttgatgatgatgatctcagtgttattacaggtgcttttaaactagtaactgcttaaataaagtgtactcgaagccagtaaaaaaaaaaaaa

SEQ ID NO: 617 - protein, 1024 aa, Homo Sapiens
MNFIKDNSRALIQRMGMTVIKQITDDLFVWNVLNREEVNIICCEKVEQDAARGIIHMILKKGSESCNLFLKSLKEWNYPLFQDLNGQSLFHQTSEGDLDDLAQDLKDLYHTPSFLNFYPLGEDIDIIFNLKSTFTEPVLWRKDQHHHRVEQLTLNGLLQALQSPCIIEGESGKGKSTLLQRIAMLWGSGKCKALTKFKFVFFLRLSRAQGGLFETLCDQLLDIPGTIRKQTFMAMLLKLRQRVLFLLDGYNEFKPQNCPEIEALIKENHRFKNMVIVTTTTECLRHIRQFGALTAEVGDMTEDSAQALIREVLIKELAEGLLLQIQKSRCLRNLMKTPLFVVITCAIQMGESEFHSHTQTTLFHTFYDLLIQKNKHKHKGVAASDFIRSLDHCGDLALEGVFSHKFDFELQDVSSVNEDVLLTTGLLCKYTAQRFKPKYKFFHKSFQEYTAGRRLSSLLTSHEPEEVTKGNGYLQKMVSISDITSTYSSLLRYTCGSSVEATRAVMKHLAAVYQHGCLLGLSIAKRPLWRQESLQSVKNTTEQEILKAININSFVECGIHLYQESTSKSALSQEFEAFFQGKSLYINSGNIPDYLFDFFEHLPNCASALDFIKLDFYGGAMASWEKAAEDTGGIHMEEAPETYIPSRAVSLFFNWKQEFRTLEVTLRDFSKLNKQDIRYLGKIFSSATSLRLQIKRCAGVAGSLSLVLSTCKNIYSLMVEASPLTIEDERHITSVTNLKTLSIHDLQNQRLPGGLTDSLGNLKNLTKLIMDNIKMNEEDAIKLAEGLKNLKKMCLFHLTHLSDIGEGMDYIVKSLSSEPCDLEEIQLVSCCLSANAVKILAQNLHNLVKLSILDLSENYLEKDGNEALHELIDRMNVLEQLTALMLPWGCDVQGSLSSLLKHLEEVPQLVKLGLKNWRLTDTEIRILGAFFGKNPLKNFQQLNLAGNRVSSDGWLAFMGVFENLKQLVFFDFSTKEFLPDPALVRKLSQVLSKLTFLQEARLVGWQFDDDDLSVITGAFKLVTA

SEQ ID NO: 618 - DNA, 2264 bp, Homo Sapiens
gtacgccatcagccggcgccgcgccgccgggtgttactttgccccgccggcggggcggtcagcctcctgtcaccgcctgttccggctatggtcccgtccggtgttctgtaagttggcaacctaggctcctgacgcgaccctggtcctgatggcggcggcgacggccgcggcagccctggcggcggccgatccccctcccgcaatgccgcaggcggcaggggccggagggcccacaacccgcagagacttctactggctgcgctcctttctggccggaggtattgctggatgctgtgccaaaacaacagttgctccattggatcgagtaaaggttttattacaagctcacaatcaccattacaagcatttaggagtattttctgcattgcgtgctgttcctcaaaaagaaggattccttggattgtataaaggaaatggtgcaatgatgattcgaatctttccctatggtgcaatccagtttatggcatttgagcattataaaacgttaattactacgaagctgggaatttcaggtcatgtgcacagattaatggctggatccatggcaggtatgacagcagttatctgtacttaccctcttgacatggttagggtccgcctagcattccaggtgaaaggggaacacagctatacaggaattattcatgctttcaaaacaatttatgcaaaggaaggtggtttctttggattttacagaggtctgatgcctactattttaggaatggctccatatgcaggtgtttcattttttacttttggtaccttgaagagtgttgggctttcccatgctcctacccttcttggcagaccttcatcagacaatcctaatgtcttagttttgaaaactcatgtaaacttactttgtggtggtgttgctggagcaatagcgcagacaatatcctacccatttgatgtgactcgtcggcgaatgcaattaggaactgttctgccggaatttgaaaagtgccttaccatgcgggatactatgaagtatgtctatggacaccatggaattcgaaaaggactctatcgtggtttatctcttaattacattcgctgtattccctctcaagcagtggcttttacaacatacgaacttatgaagcagttttttcacctcaactaaaaaaaaattatggttggtttttcttaatacattctcagagggagaaatgaaacattactataattgtggggggaacattacttgaatggggatatttaccctgtcacaagagccactggtattttagtacttgattattttttctttagtcacaaatcagaactgcttaccatactttttgatgccaaacattataccttagaacattgaagaaaatattcctaagctgatgctggctaaaccgctttaaagttttatttggaagtagaactagctttaaaacggggttcaagaggttgccattagctttgtcatgctgttcaaagtttttaattgttatcatggtttttaaaagactgacagtgtttattattattaaaataaacagggttggttatattgcaatagaataatgagaattgaatttttaagttctatgaaacagccagcattgacattttatttttgttatctctcttctcacaattatgctccactggataataggaaaaacacttctttccttcattttttaaataaaattaatgttgtatttaaaaggtagccatgtagagacacaaaaataaatgaagaagctggacatggtgggatgggcatgtggtcccagctactctggaagctgaggtgagaggatcacttgagccctggaattccatgccagcctatgcaacatcatgaaaccccacttaataaatgaatgaacgactaagtcttgctcaaatgttattatgaggtactatgagtgacttacatgtgttttaaaatgtcagtgtgtttcccagaggcagaaataaaaatactgaatatctttgctcttaaaaaaaaagtaacactatagatttgtttttgttagatgatttgctctatagtagaatatttaagtagactgtgaaatatttattaatatagatgtgaatatcaaaaaatgtttctaaggtattatgatgcatcaactagttcttccatgtaaaataattttagtgcaatatgaagacgtagaaatgtaaaatatgatttgaattgttatcctttatattaagaaaatgttttaaaatgtaagaattccatttattctgttaaaaaaaaaaaaaaaaaa

SEQ ID NO: 619 - protein, 332 aa, Homo Sapiens
MAAATAAAALAAADPPPAMPQAAGAGGPTTRRDFYWLRSFLAGGIAGCCAKTTVAPLDRVKVLLQAHNHHYKHLGVFSALRAVPQKEGFLGLYKGNGAMMIRIFPYGAIQFMAFEHYKTLITTKLGISGHVHRLMAGSMAGMTAVICTYPLDMVRVRLAFQVKGEHSYTGIIHAFKTIYAKEGGFFGFYRGLMPTILGMAPYAGVSFFTFGTLKSVGLSHAPTLLGRPSSDNPNVLVLKTHVNLLCGGVAGAIAQTISYPFDVTRRRMQLGTVLPEFEKCLTMRDTMKYVYGHHGIRKGLYRGLSLNYIRCIPSQAVAFTTYELMKQFFHLN

SEQ ID NO: 620 - DNA, 4190 bp, Homo Sapiens
atatgtagccttttcattttcatgaaagtgaagtgatttttagaattcttagttgttttctttagaagaacatttctagggaataatacaagaagatttaggaatcattgaagttataaatctttggaatgagcaaactcagaatggtgctacttgaagactctggatctgctgacttcagaagacattttgtcaacttgagtcccttcaccattactgtggtcttacttctcagtgcctgttttgtcaccagttctcttggaggaacagacaaggagctgaggctagtggatggtgaaaacaagtgtagcgggagagtggaagtgaaagtccaggaggagtggggaacggtgtgtaataatggctggagcatggaagcggtctctgtgatttgtaaccagctgggatgtccaactgctatcaaagcccctggatgggctaattccagtgcaggttctggacgcatttggatggatcatgtttcttgtcgtgggaatgagtcagctctttgggattgcaaacatgatggatggggaaagcatagtaactgtactcaccaacaagatgctggagtgacctgctcagatggatccaatttggaaatgaggctgacgcgtggagggaatatgtgttctggaagaatagagatcaaattccaaggacggtggggaacagtgtgtgatgataacttcaacatagatcatgcatctgtcatttgtagacaacttgaatgtggaagtgctgtcagtttctctggttcatctaattttggagaaggctctggaccaatctggtttgatgatcttatatgcaacggaaatgagtcagctctctggaactgcaaacatcaaggatggggaaagcataactgtgatcatgctgaggatgctggagtgatttgctcaaagggagcagatctgagcctgagactggtagatggagtcactgaatgttcaggaagattagaagtgagattccaaggagaatgggggacaatatgtgatgacggctgggacagttacgatgctgctgtggcatgcaagcaactgggatgtccaactgccgtcacagccattggtcgagttaacgccagtaagggatttggacacatctggcttgacagcgtttcttgccagggacatgaacctgctatctggcaatgtaaacaccatgaatggggaaagcattattgcaatcacaatgaagatgctggcgtgacatgttctgatggatcagatctggagctaagacttagaggtggaggcagccgctgtgctgggacagttgaggtggagattcagagactgttagggaaggtgtgtgacagaggctggggactgaaagaagctgatgtggtttgcaggcagctgggatgtggatctgcactcaaaacatcttatcaagtgtactccaaaatccaggcaacaaacacatggctgtttctaagtagctgtaacggaaatgaaacttctctttgggactgcaagaactggcaatggggtggacttacctgtgatcactatgaagaagccaaaattacctgctcagcccacagggaacccagactggttggaggggacattccctgttctggacgtgttgaagtgaagcatggtgacacgtggggctccatctgtgattcggacttctctctggaagctgccagcgttctatgcagggaattacagtgtggcacagttgtctctatcctggggggagctcactttggagagggaaatggacagatctgggctgaagaattccagtgtgagggacatgagtcccatctttcactctgcccagtagcaccccgcccagaaggaacttgtagccacagcagggatgttggagtagtctgctcaagatacacagaaattcgcttggtgaatggcaagaccccgtgtgagggcagagtggagctcaaaacgcttggtgcctggggatccctctgtaactctcactgggacatagaagatgcccatgttctttgccagcagcttaaatgtggagttgccctttctaccccaggaggagcacgttttggaaaaggaaatggtcagatctggaggcatatgtttcactgcactgggactgagcagcacatgggagattgtcctgtaactgctctaggtgcttcattatgtccttcagagcaagtggcctctgtaatctgctcaggaaaccagtcccaaacactgtcctcgtgcaattcatcgtctttgggcccaacaaggcctaccattccagaagaaagtgctgtggcctgcatagagagtggtcaacttcgcctggtaaatggaggaggtcgctgtgctgggagagtagagatctatcatgagggctcctggggcaccatctgtgatgacagctgggacctgagtgatgcccacgtggtttgcagacagctgggctgtggagaggccattaatgccactggttctgctcattttggggaaggaacagggcccatctggctggatgagatgaaatgcaatggaaaagaatcccgcatttggcagtgccattcacacggctgggggcagcaaaattgcaggcacaaggaggatgcgggagttatctgctcagaattcatgtctctgagactgaccagtgaagccagcagagaggcctgtgcagggcgtctggaagttttttacaatggagcttggggcactgttggcaagagtagcatgtctgaaaccactgtgggtgtggtgtgcaggcagctgggctgtgcagacaaagggaaaatcaaccctgcatctttagacaaggccatgtccattcccatgtgggtggacaatgttcagtgtccaaaaggacctgacacgctgtggcagtgcccatcatctccatgggagaagagactggccagcccctcggaggagacctggatcacatgtgacaacaagataagacttcaggaaggacccacttcctgttctggacgtgtggagatctggcatggaggttcctgggggacagtgtgtgatgactcttgggacttggacgatgctcaggtggtgtgtcaacaacttggctgtggtccagctttgaaagcattcaaagaagcagagtttggtcaggggactggaccgatatggctcaatgaagtgaagtgcaaagggaatgagtcttccttgtgggattgtcctgccagacgctggggccatagtgagtgtgggcacaaggaagacgctgcagtgaattgcacagatatttcagtgcagaaaaccccacaaaaagccacaacaggtcgctcatcccgtcagtcatcctttattgcagtcgggatccttggggttgttctgttggccattttcgtcgcattattcttcttgactaaaaagcgaagacagagacagcggcttgcagtttcctcaagaggagagaacttagtccaccaaattcaataccgggagatgaattcttgcctgaatgcagatgatctggacctaatgaattcctcagaaaattcccatgagtcagctgatttcagtgctgctgaactaatttctgtgtctaaatttcttcctatttctggaatggaaaaggaggccattctgagccacactgaaaaggaaaatgggaatttataacccagtgagttcagcctttaagataccttgatgaagacctggactattgaatggagcagaaattcacctctctcactgactattacagttgcatttttatggagttcttcttctcctaggattcctaagactgctgctgaatttataaaaattaagtttgtgaatgtgactacttagtggtgtatatgagactttcaagggaattaaataaataaataagaatgttattgatttgagtttgctttaattacttgtccttaattctattaatttctaaatgggcttcctaattttttgtagagtttcctagatgtattataatgtgttttatttgacagtgtttcaatttgcatatacagtactgtatattttttcttatttggtttgaataattttcctattaccaaataaaaataaatttatttttactttagtttttctaagacaggaaaagttaatgatattgaagggtctgtaaataatatatggctaactttataaggcatgactcacaacgattctttaactgctttttgttactgtaattctgttcactagaataaaatgcagagccacacctggtgagggcac

SEQ ID NO: 621 - protein, 1156 aa, Homo Sapiens
MSKLRMVLLEDSGSADFRRHFVNLSPFTITVVLLLSACFVTSSLGGTDKELRLVDGENKCSGRVEVKVQEEWGTVCNNGWSMEAVSVICNQLGCPTAIKAPGWANSSAGSGRIWMDHVSCRGNESALWDCKHDGWGKHSNCTHQQDAGVTCSDGSNLEMRLTRGGNMCSGRIEIKFQGRWGTVCDDNFNIDHASVICRQLECGSAVSFSGSSNFGEGSGPIWFDDLICNGNESALWNCKHQGWGKHNCDHAEDAGVICSKGADLSLRLVDGVTECSGRLEVRFQGEWGTICDDGWDSYDAAVACKQLGCPTAVTAIGRVNASKGFGHIWLDSVSCQGHEPAIWQCKHHEWGKHYCNHNEDAGVTCSDGSDLELRLRGGGSRCAGTVEVEIQRLLGKVCDRGWGLKEADVVCRQLGCGSALKTSYQVYSKIQATNTWLFLSSCNGNETSLWDCKNWQWGGLTCDHYEEAKITCSAHREPRLVGGDIPCSGRVEVKHGDTWGSICDSDFSLEAASVLCRELQCGTVVSILGGAHFGEGNGQIWAEEFQCEGHESHLSLCPVAPRPEGTCSHSRDVGVVCSRYTEIRLVNGKTPCEGRVELKTLGAWGSLCNSHWDIEDAHVLCQQLKCGVALSTPGGARFGKGNGQIWRHMFHCTGTEQHMGDCPVTALGASLCPSEQVASVICSGNQSQTLSSCNSSSLGPTRPTIPEESAVACIESGQLRLVNGGGRCAGRVEIYHEGSWGTICDDSWDLSDAHVVCRQLGCGEAINATGSAHFGEGTGPIWLDEMKCNGKESRIWQCHSHGWGQQNCRHKEDAGVICSEFMSLRLTSEASREACAGRLEVFYNGAWGTVGKSSMSETTVGVVCRQLGCADKGKINPASLDKAMSIPMWVDNVQCPKGPDTLWQCPSSPWEKRLASPSEETWITCDNKIRLQEGPTSCSGRVEIWHGGSWGTVCDDSWDLDDAQVVCQQLGCGPALKAFKEAEFGQGTGPIWLNEVKCKGNESSLWDCPARRWGHSECGHKEDAAVNCTDISVQKTPQKATTGRSSRQSSFIAVGILGVVLLAIFVALFFLTKKRRQRQRLAVSSRGENLVHQIQYREMNSCLNADDLDLMNSSENSHESADFSAAELISVSKFLPISGMEKEAILSHTEKENGNL

SEQ ID NO: 622 - DNA, 4190 bp, Homo Sapiens; identical to SEQ ID NO: 620

SEQ ID NO: 623 - protein, 1156 aa, Homo Sapiens; identical to SEQ ID NO: 621

SEQ ID NO: 624 - DNA, 1619 bp, Homo Sapiens
ctccagctgagctaagtgtagcagcagcaccagggcagggactgactccagcccttggactcaggacatcgcagaccttcccttgcgtgcgtgactcattcgcacatccatttctgtttatgcctggggtggggagaaaaatcccaaaccagctccattggatatgactgtgcactggagccggttgtgctgttctctcagctgtacacacccatcaaatcacagtgcccctgaggacgagagaaaattgaagctgtgtaaatgagtatggaagattatgatttcctgttcaaaattgttttaattggcaacgctggtgtggggaagacgtgcctcgtccgaagattcactcagggtcttttccccccaggtcaaggagccacaattggagttgattttatgattaagacagtggagattaatggtgaaaaagtaaagctacagatctgggacacagcaggtcaagagagatttcggtccattacccagagttactaccgaagcgccaatgccttgatcctcacctatgacattacctgtgaggaatccttccgttgccttcctgagtggctgcgggagatagaacaatatgccagcaacaaggtcatcactgtgttagtgggcaacaagattgacctggctgaaaggagagaggtttcccagcagcgagctgaagaattctcagaagctcaggacatgtattatctggagacctcagccaaggaatctgataatgtggagaaactcttccttgacttagcatgccgactcatcagtgaagccagacagaacacacttgtgaacaatgtatcctcacccttacctggagaagggaaaagcatcagctatttgacttgttgtaatttcaactaaaggctgaggcacggagaagaaaaggaatcagcaactgccctgatgggccatgagatgctggggagatctggcgatgactgtggctcccgctctctgaccttctgactcctgtgggctcctgagcttacaaagcatggcaggccaagggcctcgaccacaggccagcattagcagaacatataatggtttcacccttttccagtctggagttggagcaaggagaaaattgcactaggcactccatgatctgcagagcatgttgcttttgtttttttaaaaagcaagtaaaagcgcattcctaaacagagtccggggggaaatgtactgtagggatccctcctgcacatcagtgggtgcatgtgggaactcttctttagggcttcggtggtaatcatctgggggccctggttttcttgtctaccagataaaccaaaactgggaaggccaagtacagtctctgtggtgcgtattgacgaccccatggagattttgaaaagtgttatttctcttgtccacaggcactttcaagaactttgggatgtaaaaatgaaatgaaacctttacccatgaccaacagtaacaatcattgttttaataatatatacaagctccataactccttttggtgctaatgattccgctatttcacagaccaaacgttttagtacattaatgtccttaaatgtgttatatagaaataaaaaaatgggggaagtccatgaatcagcaaaaaaaaaaaaaaaaaa

SEQ ID NO: 625 - protein, 203 aa, Homo Sapiens
MSMEDYDFLFKIVLIGNAGVGKTCLVRRFTQGLFPPGQGATIGVDFMIKTVEINGEKVKLQIWDTAGQERFRSITQSYYRSANALILTYDITCEESFRCLPEWLREIEQYASNKVITVLVGNKIDLAERREVSQQRAEEFSEAQDMYYLETSAKESDNVEKLFLDLACRLISEARQNTLVNNVSSPLPGEGKSISYLTCCNFN

SEQ ID NO: 626 - DNA, 3088 bp, Homo Sapiens
cggagagccgcgcagggcgcgggccgcgcggggtggggcagccggagcgcaggcccccgatccccggcgggcgcccccgggcccccgcgcgcgccccggcctccgggagactggcgcatgccacggagcgcccctcgggccgccgccgctcctgcccgggcccctgctgctgctgctgtcgcctgcgcctgctgccccaactcggcgcccgacttcttcatggtgtgcggaggtcatgttcgctccttagcaggcaaacgacttttctcctcgcctcctcgccccgcatgttcaggaccaaacgatctgcgctcgtccggcgtctctggaggagccgtgcgcccggcggcgaggacgaggaggagggcgcagggggaggtggaggaggaggcgagctgcggggagaaggggcgacggacagccgagcgcatggggccggtggcggcggcccgggcagggctggatgctgcctgggcaaggcggtgcgaggtgccaaaggtcaccaccatccccacccgccagccgcgggcgccggcgcggccgggggcgccgaggcggatctgaaggcgctcacgcactcggtgctcaagaaactgaaggagcggcagctggagctgctgctccaggccgtggagtcccgcggcgggacgcgcaccgcgtgcctcctgctgcccggccgcctggactgcaggctgggcccgggggcgcccgccggcgcgcagcctgcgcagccgccctcgtcctactcgctccccctcctgctgtgcaaagtgttcaggtggccggatctcaggcattcctcggaagtcaagaggctgtgttgctgtgaatcttacgggaagatcaaccccgagctggtgtgctgcaacccccatcaccttagccgactctgcgaactagagtctcccccccctccttactccagatacccgatggattttctcaaaccaactgcagactgtccagatgctgtgccttcctccgctgaaacagggggaacgaattatctggcccctggggggctttcagattcccaacttcttctggagcctggggatcggtcacactggtgcgtggtggcatactgggaggagaagacgagagtggggaggctctactgtgtccaggagccctctctggatatcttctatgatctacctcaggggaatggcttttgcctcggacagctcaattcggacaacaagagtcagctggtgcagaaggtgcggagcaaaatcggctgcggcatccagctgacgcgggaggtggatggtgtgtgggtgtacaaccgcagcagttaccccatcttcatcaagtccgccacactggacaacccggactccaggacgctgttggtacacaaggtgttccccggtttctccatcaaggctttcgactacgagaaggcgtacagcctgcagcggcccaatgaccacgagtttatgcagcagccgtggacgggctttaccgtgcagatcagctttgtgaagggctggggccagtgctacacccgccagttcatcagcagctgcccgtgctggctagaggtcatcttcaacagccggtagccgcgtgcggaggggacagagcgtgagctgagcaggccacacttcaaactactttgctgctaatattttcctcctgagtgcttgcttttcatgcaaactctttggtcgttttttttttgtttgttggttggttttcttcttctcgtcctcgtttgtgttctgttttgtttcgctctttgagaaatagcttatgaaaagaattgttgggggtttttttggaagaaggggcaggtatgatcggcaggacaccctgataggaagaggggaagcagaaatccaagcaccaccaaacacagtgtatgaaggggggcggtcatcatttcacttgtcaggagtgtgtgtgagtgtgagtgtgcggctgtgtgtgcacgcgtgtgcaggagcggcagatggggagacaacgtgctctttgttttgtgtctcttatggatgtccccagcagagaggtttgcagtcccaagcggtgtctctcctgccccttggacacgctcagtggggcagaggcagtacctgggcaagctggcggctggggtcccagcagctgccaggagcacggctctgtccccagcctgggaaagcccctgcccctcctctccctcatcaaggacacgggcctgtccacaggcttctgagcagcgagcctgctagtggccgaaccagaaccaattattttcatccttgtcttattcccttcctgccagcccctgccattgtagcgtctttcttttttggccatctgctcctggatctccctgagatgggcttcccaagggctgccggggcagccccctcacagtattgctcacccagtgccctctcccctcagcctctcccctgcctgccctggtgacatcaggtttttcccggacttagaaaaccagctcagcactgcctgctcccatcctgtgtgttaagctctgctattaggccagcaagcggggatgtccctgggagggacatgcttagcagtccccttccctccaagaaggatttggtccgtcataacccaaggtaccatcctaggctgacacctaactcttctttcatttcttctacaactcatacactcgtatgatacttcgacactgttcttagctcaatgagcatgtttagactttaacataagctatttttctaactacaaaggtttaaatgaacaagagaagcattctcattggaaatttagcattgtagtgctttgagagagaaaggactcctgaaaaaaaacctgagatttattaaagaaaaaaatgtattttatgttatatataaatatattattacttgtaaatataaagacgttttataagcatcattatttatgtattgtgcaatgtgtataaacaagaaaaataaagaaaagatgcactttgctttaatataaatgcaaataacaaatgccaaattaaaaaagataaacacaagattggtgtttttttctatgggtgttatcacctagctgaatgtttttctaaaggagtttatgttccattaaacgatttttaaaatgtacacttgaa

SEQ ID NO: 627 - protein, 426 aa, Homo Sapiens
MFRTKRSALVRRLWRSRAPGGEDEEEGAGGGGGGGELRGEGATDSRAHGAGGGGPGRAGCCLGKAVRGAKGHHHPHPPAAGAGAAGGAEADLKALTHSVLKKLKERQLELLLQAVESRGGTRTACLLLPGRLDCRLGPGAPAGAQPAQPPSSYSLPLLLCKVFRWPDLRHSSEVKRLCCCESYGKINPELVCCNPHHLSRLCELESPPPPYSRYPMDFLKPTADCPDAVPSSAETGGTNYLAPGGLSDSQLLLEPGDRSHWCVVAYWEEKTRVGRLYCVQEPSLDIFYDLPQGNGFCLGQLNSDNKSQLVQKVRSKIGCGIQLTREVDGVWVYNRSSYPIFIKSATLDNPDSRTLLVHKVFPGFSIKAFDYEKAYSLQRPNDHEFMQQPWTGFTVQISFVKGWGQCYTRQFISSCPCWLEVIFNSR

SEQ ID NO: 628 - DNA, 2381 bp, Homo Sapiens
attcggccgaaggagctacgcgggccacgctgctggctggcctgacctaggcgcgcggggtcgggcggccgcgcgggcgggctgagtgagcaagacaagacactcaagaagagcgagctgcgcctgggtcccggccaggcttgcacgcagaggcgggcggcagacggtgcccggcggaatctcctgagctccgccgcccagctctggtgccagcgcccagtggccgccgcttcgaaagtgactggtgcctcgccgcctcctctcggtgcgggaccatgaagctgctgccgtcggtggtgctgaagctctttctggctgcagttctctcggcactggtgactggcgagagcctggagcggcttcggagagggctagctgctggaaccagcaacccggaccctcccactgtatccacggaccagctgctacccctaggaggcggccgggaccggaaagtccgtgacttgcaagaggcagatctggaccttttgagagtcactttatcctccaagccacaagcactggccacaccaaacaaggaggagcacgggaaaagaaagaagaaaggcaaggggctagggaagaagagggacccatgtcttcggaaatacaaggacttctgcatccatggagaatgcaaatatgtgaaggagctccgggctccctcctgcatctgccacccgggttaccatggagagaggtgtcatgggctgagcctcccagtggaaaatcgcttatatacctatgaccacacaaccatcctggccgtggtggctgtggtgctgtcatctgtctgtctgctggtcatcgtggggcttctcatgtttaggtaccataggagaggaggttatgatgtggaaaatgaagagaaagtgaagttgggcatgactaattcccactgagagagacttgtgctcaaggaatcggctggggactgctacctctgagaagacacaaggtgatttcagactgcagaggggaaagacttccatctagtcacaaagactccttcgtccccagttgccgtctaggattgggcctcccataattgctttgccaaaataccagagccttcaagtgccaaacagagtatgtccgatggtatctgggtaagaagaaagcaaaagcaagggaccttcatgcccttctgattcccctccaccaaaccccacttcccctcataagtttgtttaaacacttatcttctggattagaatgccggttaaattccatatgctccaggatctttgactgaaaaaaaaaaagaagaagaagaaggagagcaagaaggaaagatttgtgaactggaagaaagcaacaaagattgagaagccatgtactcaagtaccaccaagggatctgccattgggaccctccagtgctggatttgatgagttaactgtgaaataccacaagcctgagaactgaattttgggacttctacccagatggaaaaataacaactatttttgttgttgttgtttgtaaatgcctcttaaattatatatttattttattctatgtatgttaatttatttagtttttaacaatctaacaataatatttcaagtgcctagactgttactttggcaatttcctggccctccactcctcatccccacaatctggcttagtgccacccacctttgccacaaagctaggatggttctgtgacccatctgtagtaatttattgtctgtctacatttctgcagatcttccgtggtcagagtgccactgcgggagctctgtatggtcaggatgtaggggttaacttggtcagagccactctatgagttggacttcagtcttgcctaggcgattttgtctaccatttgtgttttgaaagcccaaggtgctgatgtcaaagtgtaacagatatcagtgtctccccgtgtcctctccctgccaagtctcagaagaggttgggcttccatgcctgtagctttcctggtccctcacccccatggccccaggcccacagcgtgggaactcactttcccttgtgtcaagacatttctctaactcctgccattcttctggtgctactccatgcaggggtcagtgcagcagaggacagtctggagaaggtattagcaaagcaaaaggctgagaaggaacagggaacattggagctgactgttcttggtaactgattacctgccaattgctaccgagaaggttggaggtggggaaggctttgtataatcccacccacctcaccaaaacgatgaagttatgctgtcatggtcctttctggaagtttctggtgccatttctgaactgttacaacttgtatttccaaacctggttcatatttatactttgcaatccaaataaagataacccttattccataaaaaaaaaaaaaaaaaaaaaaaa

SEQ ID NO: 629 - protein, 208 aa, Homo Sapiens
MKLLPSVVLKLFLAAVLSALVTGESLERLRRGLAAGTSNPDPPTVSTDQLLPLGGGRDRKVRDLQEADLDLLRVTLSSKPQALATPNKEEHGKRKKKGKGLGKKRDPCLRKYKDFCIHGECKYVKELRAPSCICHPGYHGERCHGLSLPVENRLYTYDHTTILAVVAVVLSSVCLLVIVGLLMFRYHRRGGYDVENEEKVKLGMTNSH

SEQ ID NO: 630 - DNA, 1878 bp, Homo Sapiens
gccaagggaaactgccgcgaggaggcggaaggagcagaggaccggcagccggcgtcgaggcggggcgcgggaacgacggcggccatggcggcctcggggcccgggtgtcgcagctggtgcttgtgtcccgaggtgccatccgccaccttcttcactgcgctgctctcgctgctggtttccgggcctcgcctgttcctgctgcagcagcccctggcgccctcgggcctcacgctgaagtccgaggcccttcgcaactggcaagccactatggaaggaggggtcaggattacagcagaggagactggcacacagagtgttaagtgacacccactcaatccaccccgaagctgttacacttaattaaccctcaaactgcccagtgagtttacaggctggtaacctacatctttgtctacgagaatcccatctccctgctctgcggcgctatcatcatctggcgctttgctggcaatttcgagagaaccgtgggcaccgtccgccactgcttcttcaccgtgatcttcgccatcttctccgctatcatcttcctgtcattcgaggctgtgtcatcactgtcaaagctgggggaagtggaggatgccagaggtttcaccccagtggcctttgccatgctgggagtcaccaccgtccgttctcggatgaggcgggccctggtgtttggcatggttgtgccctcagtcctggttccgtggctcctgctgggtgcctcgtggctcattccccagacctctttcctcagtaatgtctgcgggctgtccatcgggctggcctatggcctcacctactgctattccatcgacctctcagagcgagtggcactgaagctcgatcagaccttccccttcagcctgatgaggaggatatccgtgttcaagtacgtctcagggtcttcagccgagaggagggcagcccagagccggaaactgaacccggtgcctggctcctaccccacacagagctgccaccctcacctgtccccaagccaccctgtgtcccagacgcagcacgccagtggtcagaagctggcctcctggccctcctgcacccccgggcacatgcccaccttgcctccgtaccagcctgcctccggcctgtgctatgtgcagaaccactttggtccaaaccccacctcctccagtgtctacccagcttctgcgggcacctccctgggcatccagccccccacgcctgtgaacagccctggcacggtgtattctggggccttgggcacaccaggggctgcaggctccaaggagtcctccagggtccccatgccctgagagaatttctagggaagtcatctcacttggccttctgaaggtcctccctaagagtctcctgacaaaagttacttattgaacacctctatgtgccaggctctgtgttgggtactttgatcaatgcccctgtttcagtctcatctgtactcacggcagccctgtggagtacggtgtactggcccagcttacagatgcagaaagcgagacgttctgccatcagataaagtcacgtggctctttagtaacacggacaaggctcctcgccaaggaactcgtggcagaagagggcagcagttggcagtagctgccgatgtctgtccccagctccaccattcctccctgtggctgtgccgtgctcgtggtttcagtgtccgtgtgtccatgtgtctgcccttcaggagctcgcagctggtgtgcttggcggtcccaggcctgtgtagtgtctctcccctgctgcgggcgcccccaccccgattcctctccccagaagcggtgggatgggcccccatgaactgcagcagcatgctgaggtgtccatgttgtctgcctttgtataaagaaacagcctctgacctgc

SEQ ID NO: 631 - protein, 223 aa, Homo Sapiens
MLGVTTVRSRMRRALVFGMVVPSVLVPWLLLGASWLIPQTSFLSNVCGLSIGLAYGLTYCYSIDLSERVALKLDQTFPFSLMRRISVFKYVSGSSAERRAAQSRKLNPVPGSYPTQSCHPHLSPSHPVSQTQHASGQKLASWPSCTPGHMPTLPPYQPASGLCYVQNHFGPNPTSSSVYPASAGTSLGIQPPTPVNSPGTVYSGALGTPGAAGSKESSRVPMP

SEQ ID NO: 632 - DNA, 5762 bp, Homo Sapiens; identical to SEQ ID NO: 475

SEQ ID NO: 633 - protein, 1346 aa, Homo Sapiens; identical to SEQ ID NO: 476

SEQ ID NO: 634 - DNA, 10098 bp, Homo Sapiens
gcagtaaccatgtggatgtgctgctgaagcgtttcctcaagctcgctggggtgggaggagaggaggaggaggaggtggtggtggaggaggaggcagggggtggagagagagaaagcgcacgccgagaggaggtgtgggtgttccgcttccatcctaacggaacgagctccctcttcgcggacatgggattacccagcggctgctaacccctctcctcgccctgctcccccaaaccggcgtggctccccgggcaccaaggagctgactacagaggagcaggatttgcacccctcgctgggcttgctttggcaacagagtgcctgacccaggtcaggattttcaagaaagacatgtctgacaaaatgtctagcttcctacatattggagacatttgttctctgtacgcggagggatcgacaaatggatttattagcaccttgggcctggttgatgatcgttgtgttgtacagccagaaaccggggaccttaacaatccacctaagaaattcagagactgcctctttaagctatgtcccatgaaccgctactctgcccaaaagcagttctggaaagccgctaagcctggggccaacagcaccacagacgcagtgctactcaacaaactgcaccacgctgcagacttggaaaagaagcagaatgagacagaaaacaggaaattgctggggaccgtaatccagtatggcaatgtgatccagctcctgcatttgaaaagtaataaatacctaacagtgaataagaggcttcctgctctgttggagaagaatgccatgagagtcacattggacgaggctggaaatgaagggtcctggttttatattcagccattctacaagctgcgatccattggagacagcgtggtcataggtgacaaggtggttctgaaccccgtcaatgctggtcagcccctacatgctagcagccatcaactggtagataacccaggctgcaatgaggtcaattccgtcaactgcaatacaagctggaaaatagtccttttcatgaaatggagtgataacaaagacgacatattaaaggggggtgacgtggtgaggctgtttcatgctgagcaggagaagtttctcacctgtgacgaacacaggaagaagcagcacgtcttcctgagaaccacgggccggcagtcggccacatctgccaccagttcaaaagccctgtgggaggtggaggtggtccagcatgacccatgtcggggcggagcagggtattggaacagccttttccgtttcaagcatctggccacggggcattacttggcagcagaggtagaccctgactttgaggaagaatgcctggagtttcagccctcagtggaccctgatcaggacgcctctcgaagtaggttgcggaatgcccaagaaaagatggtatactccctggtctctgtgcctgaaggcaatgacatctcctccattttcgagctagatcccaccactctgcgtggaggtgacagccttgtcccaaggaactcttatgttcggctcagacacctatgtactaatacctgggttcacagcacaaatattcctattgacaaggaagaagaaaagcccgtgatgctgaaaattggcacctctcctgtgaaggaggataaggaagcatttgccatagttccggtttctcctgctgaagttcgggacctggactttgccaatgatgccagcaaggtgctgggctccattgctgggaagctagagaagggcaccatcacccagaatgaaaggaggtctgtaaccaagctgctagaagatttggtttacttcgtcactggtggaactaattctggtcaagatgttctcgaagttgtcttctccaagcccaacagagaacggcagaaactgatgagagaacagaatattctcaagcagatcttcaagttgttacaagccccattcacagactgcggtgatggcccaatgcttcggctggaagagctcggggaccagcggcacgctcctttcagacacatctgccggctctgctacagggtgctgagacactcgcagcaagactacaggaagaaccaggagtatatagccaagcagtttggcttcatgcagaagcagattggctatgatgtgttggctgaagacactatcactgccctgctccacaataatcggaaactcctggaaaaacacattaccgcggcagagattgacacatttgtcagcctggtgcgaaagaacagggagcccagattcttagattacctctccgacctctgtgtctccatgaacaaatcaattccagtgacccaggaactgatatgtaaagctgtgctgaaccccaccaacgctgacatcctgattgagaccaagttggttctttctcgttttgaatttgaaggtgtctcttccactggagagaatgctctggaggcaggagaagacgaggaagaggtgtggctgttttggagggacagcaacaaagagattcgcagcaagagtgtgagggaattggctcaggatgctaaagaagggcagaaggaggaccgagacgttctcagctactacagatatcagctgaacctctttgcgaggatgtgtctggaccgccaatacctggccatcaacgaaatctcaggccagctggatgtcgatctcattctccgctgcatgtctgacgagaacctgccctatgacctcagggcgtccttctgccgcctcatgcttcacatgcatgtggaccgagatccccaggaacaagtcacccccgtgaaatatgcccgcctctggtcggagattccctcggagatcgccattgacgactatgatagtagtggagcttccaaagatgaaattaaggagagatttgctcagaccatggagtttgtggaggagtatttaagagatgtggtttgtcagaggttccctttctctgataaagagaagaataagcttacgtttgaggttgtaaatttagctaggaatctcatatactttggtttctacaacttctctgaccttctacgattaactaagatccttctggccatattggactgtgtacatgtgacaacaatcttccccattagcaagatggcgaaaggagaagagaataaaggcagtaacgtgatgagatctattcatggcgtgggagagctgatgacccaggtggtgctccggggaggaggctttttgcccatgactcccatggctgctgcccctgaaggcaatgtgaagcaggcagagcctgagaaggaggacatcatggtcatggacaccaagctgaagatcattgagatactccagtttattttgaatgtgaggttggattataggatctcctgcctcctgtgtatatttaagcgagagtttgatgaaagcaattcccagacttcagaaacatcctccggaaacagcagccaagaagggccaagtaatgtaccaggtgctcttgactttgaacacattgaagaacaagcagaaggcatctttggaggaagtgaggagaacaccccactggacttggatgaccacggcggcagaacctttctccgtgtcctgctccacttgacgatgcatgactacccacccctggtgtcaggggccctgcagctcctcttccggcacttcagccagaggcaggaggtgctccaggccttcaaacaggttcaactgctggttaccagccaagatgtggacaactacaaacagatcaaacaagacttggatcaactgaggtccatcgtggaaaagtcagagctttgggtgtacaaagggcagggccccgatgagactatggatggtgcatctggagaaaatgaacataagaaaacggaggagggaaataacaagccacaaaagcatgaaagcaccagcagctacaactacagagtggtcaaagagattttgattcggcttagcaaactctgtgttcaagagagtgcctcagtgagaaagagcaggaagcagcaacagcgtctgctccggaacatgggcgcgcacgccgtggtgctggagctgctgcagattccctatgagaaggccgaagataccaagatgcaagagataatgaggttggctcatgaatttttgcagaatttctgcgcaggcaaccagcagaatcaagctttgctacataaacacataaacctgtttctcaacccagggatcctggaggcagtaaccatgcagcacatcttcatgaacaatttccagctttgcagtgagatcaacgagagagttgttcagcacttcgttcactgcatagagactcacggtcggaatgtccagtatataaagttcttacagacaattgtcaaggcagaagggaaatttattaaaaaatgccaagacatggttatggccgagctggtcaattcgggagaggatgtcctcgtgttctacaacgacagagcctctttccagactctgatccagatgatgcggtcagaacgggatcggatggatgagaacagccctctcatgtaccacatccacttggtcgagctcctggctgtgtgcacggagggtaagaatgtctacacagagatcaagtgcaactccctgctcccgctggatgacatcgttcgcgtggtgacccacgaggactgcatccctgaggttaaaattgcatacattaacttcctgaatcactgctatgtggatacagaggtggaaatgaaggagatttataccagcaatcacatgtggaaattgtttgagaatttccttgtagacatctgcagggcctgtaacaacactagtgacaggaaacatgcagactcgattttggagaagtatgtcaccgaaatcgtcatgagtattgttactactttcttcagctctcccttctcagaccagagtacgactttgcagactcgccagcctgtctttgtgcaactgctgcaaggcgtgttcagggtttaccactgcaactggttaatgccaagccaaaaagcctccgtggagagctgtattcgggtgctgtctgatgtagccaagagccgggccattgccattcccgtggacctggacagccaagtcaacaacctctttctcaagtcccacagcattgtgcagaaaacagccatgaactggcggctctcagcccgcaatgccgcacgcagggactctgttctggcagcttccagagactaccggaatatcattgagagattgcaggacatcgtctccgcgctggaggaccgtctcaggcccctggtgcaggcagagttatctgtgctcgtggatgttctccacagacccgagctgcttttcccagagaacacagacgccagaaggaaatgtgaaagtggcggtttcatttgcaagttaataaagcatacaaaacagctgctagaagaaaatgaagagaagctctgcattaaggtcctacagaccctgagggaaatgatgaccaaagatagaggctatggagaaaagggtgaggcgctcaggcaagttctggtcaaccgttactatggaaacgtcagaccttcgggacgaagagagagccttaccagctttggcaatggcccactgtcagcaggaggacccggcaagcccgggggaggagggggaggttccggatccagctctatgagcaggggtgagatgagtctggccgaggttcagtgtcaccttgacaaggagggggcttccaatctagttatcgacctcatcatgaacgcatccagtgaccgagtgttccatgaaagcattctcctggccattgcccttctggaaggaggcaacaccaccatccagcactcctttttctgtcgcttgacagaagataagaagtcagagaaattctttaaggtgttttatgaccggatgaaggtggcccagcaagaaatcaaagcaacagtgacagtgaacaccagtgacttgggaaataaaaagaaagacgatgaggtagacagggatgccccatcacggaaaaaagctaaagagcccacaacacagataacagaagaggtccgggatcagctcctggaggcctccgctgccaccaggaaagccttcaccactttcaggagggaggctgatcccgacgaccactaccagcctggagagggcacccaggccactgccgacaaggccaaggacgacctggagatgagcgcggtcatcaccatcatgcagcccatcctccgcttccttcagctcctgtgtgaaaaccacaaccgagacctgcagaacttcctccgttgccaaaataacaagaccaactacaatttggtatgtgagaccctgcagtttctggactgtatttgtggaagcacaactggaggccttggtcttctgggcttgtatataaatgaaaagaacgtagcgcttatcaaccaaaccctggaaagtctgaccgaatactgtcaaggaccttgccatgagaaccagaactgcatagccacccatgaatccaatggcattgacatcatcacagccctgatcctcaatgatatcaatcctttgggaaagaagaggatggaccttgtgttagaactgaagaacaatgcctcgaagttgctcctggccatcatggaaagcaggcacgacagtgaaaacgcagagaggatactttataacatgaggcccaaggaactggtggaagtgatcaagaaagcctacatgcaaggtgaagtggaatttgaggatggagaaaacggtgaggatggggcggcgtcccccaggaacgtggggcacaacatctacatattagcccatcagttggctcggcataacaaagaacttcagagcatgctgaaacctggtggccaagtggacggagatgaagccctggagttttatgccaagcacacggcgcagatagagattgtcagattagaccgaacaatggaacagatagtctttcccgtgcccagcatatgtgaattcctaaccaaggagtcaaaactacgaatttactatactacagagagagacgaacaaggcagcaaaatcaatgatttctttctgcggtctgaagacctcttcaatgaaatgaattggcagaagaaactgagagcccagcccgtgttgtactggtgtgcccgcaacatgtctttctggagcagcatttcgtttaacctggccgtcctgatgaacctgctggtggcgtttttctacccgtttaagggagtccgaggaggaaccctggagccccactggtcgggactcctgtggacagccatgctcatctctctggccatcgtcattgccctccccaagccccatggcatccgggccttaattgcctccacaattctacgactgatattttcagtcgggttacaacccacgttgtttcttctgggcgctttcaatgtatgcaataaaatcatctttctaatgagctttgtgggcaactgtgggacattcacaagaggctaccgagccatggttctggatgttgagttcctctatcatttgttgtatctggtgatctgtgccatggggctctttgtccatgaattcttctacagtctgctgctttttgatttagtgtacagagaagagactttgcttaatgtcattaaaagtgtcactcgcaatggacggtccatcatcctgacagcagttctggctctgatcctcgtttacctgttctcaatagtgggctatcttttcttcaaggatgactttatcttggaagtagataggctgcccaatgaaacagctgttccagaaaccggcgagagtttggcaagcgagttcctgttctccgatgtgtgtagggtggagagtggggagaactgctcctctcctgcacccagagaagagctggtccctgcagaagagacggaacaggataaagagcacacatgtgagacgctgctgatgtgcattgtcactgtgctgagtcacgggctgcggagcgggggtggagtaggagatgtactcaggaagccgtccaaagaggaacccctgtttgctgctagagttatttatgacctcttgttcttcttcatggtcatcatcattgttcttaacctgatttttggggttatcattgacacttttgctgacctgaggagtgagaagcagaagaaggaagagatcttgaagaccacgtgctttatctgtggcttggaaagagacaagtttgacaacaagactgtcacctttgaagagcacatcaaggaagaacacaacatgtggcactatctgtgcttcatcgtcctggtgaaagtaaaggactccaccgaatatactgggcctgagagttacgtggcagaaatgatcaaggaaagaaaccttgactggttccccaggatgagagccatgtcattggtcagcagtgattctgaaggagaacagaatgagctgagaaacctgcaggagaagctggagtccaccatgaaacttgtcacgaacctttctggccagctgtcggaattaaaggatcagatgacagaacaaaggaagcagaaacaaagaattggtcttctaggacatcctcctcacatgaatgtcaacccacaacaaccagcataagcaaatgaaagaaaggaattgtatttaccttttataattattattagtgtgggtatggctaatgagttctgattcacccacgaaggttacatttatgctgaatacatttgtaaatactcagttttatactgtatgtatatgattgctactctaaaggtttggatatatgtattgtaattagaattgttggcatgatgacatttcatttgtgccaaaaatattaaaaatgccttttttggaaggactaacagaaagcacctgatttgcacttgaaccagattatagatttaaaagtatatgacatgtattttgtatttaaaactagaatagccagtatttatgttttttataaaactgtgcaatacgaattatgcaatcacaatacatttgtagctcccgagtgtcctaaagggagtgcacttctttgaagctggtgtgttaatactatgtaataaatggttaactttcaaatgatgctgctgccaaaattatattaatagtgagtttcaggcccctgggcattttgtaccatgtaattatcctctggtgatgctgtttctcgttagtggcagtagtgcctccgtctcctagtgataatgctccaagtctatgaactgttaaatcagcattcattttaagaaaagcaactttagtttcaaagatacttttaagcttctaaattgatcatttaaactatttctttaaataagagagccaaattagaggctcatactttagcttgtgaagaagataatgaattttttaaagggaactttctatgcaatgttcaggataaatgcatactgctggccaatcagtgtcatctcctgggtaaattttgatgtcgcattataaagacatgcataattgatggtttctagattatctagtccaaacaatagagtttattttttcttcatctgaaccaacatgctacagtagctaagaagtattaaaactatatacatccatataaagatgaaatatgaactatctcattagaagtcatagttgaccacagacatgttattcttctgaaagagccacattttggttttatttcttgtcacatgatttcttttcttgatggatgaaaaatatgaaaggaaacttttatatctgttgcctagttttgtacatggatctcattttacaagagaatctctctgcaaaaaaaaaaaaaacagtttaaaaatgcattgaaagcagagttctgaaatgagtaaagtttgtaaatgcatatataaaaatatttaataaatgatgcagaatatacagtgactggttggtggctttcatttggcatttgtgacttaactgctattccatttatgtactttctttaggatcagtttgaagtacagtcggtttgattaccaggttaattcagaaaatgtttacctgattatttaaaaaaacacttgctgttgttatgacagctctgaggagaattattagaacaaacattggggagtatttagtacaacattcattcattcttctggattagtgactgccagccaggctgtcgggagcgccctactaaatctcctgtctcttctgcttttactgggggatctttaatttgctgtgtgccatgtggaagtatcgggaa

SEQ ID NO: 635 - protein, 2710 aa, Homo Sapiens
MSDKMSSFLHIGDICSLYAEGSTNGFISTLGLVDDRCVVQPETGDLNNPPKKFRDCLFKLCPMNRYSAQKQFWKAAKPGANSTTDAVLLNKLHHAADLEKKQNETENRKLLGTVIQYGNVIQLLHLKSNKYLTVNKRLPALLEKNAMRVTLDEAGNEGSWFYIQPFYKLRSIGDSVVIGDKVVLNPVNAGQPLHASSHQLVDNPGCNEVNSVNCNTSWKIVLFMKWSDNKDDILKGGDVVRLFHAEQEKFLTCDEHRKKQHVFLRTTGRQSATSATSSKALWEVEVVQHDPCRGGAGYWNSLFRFKHLATGHYLAAEVDPDFEEECLEFQPSVDPDQDASRSRLRNAQEKMVYSLVSVPEGNDISSIFELDPTTLRGGDSLVPRNSYVRLRHLCTNTWVHSTNIPIDKEEEKPVMLKIGTSPVKEDKEAFAIVPVSPAEVRDLDFANDASKVLGSIAGKLEKGTITQNERRSVTKLLEDLVYFVTGGTNSGQDVLEVVFSKPNRERQKLMREQNILKQIFKLLQAPFTDCGDGPMLRLEELGDQRHAPFRHICRLCYRVLRHSQQDYRKNQEYIAKQFGFMQKQIGYDVLAEDTITALLHNNRKLLEKHITAAEIDTFVSLVRKNREPRFLDYLSDLCVSMNKSIPVTQELICKAVLNPTNADILIETKLVLSRFEFEGVSSTGENALEAGEDEEEVWLFWRDSNKEIRSKSVRELAQDAKEGQKEDRDVLSYYRYQLNLFARMCLDRQYLAINEISGQLDVDLILRCMSDENLPYDLRASFCRLMLHMHVDRDPQEQVTPVKYARLWSEIPSEIAIDDYDSSGASKDEIKERFAQTMEFVEEYLRDVVCQRFPFSDKEKNKLTFEVVNLARNLIYFGFYNFSDLLRLTKILLAILDCVHVTTIFPISKMAKGEENKGSNVMRSIHGVGELMTQVVLRGGGFLPMTPMAAAPEGNVKQAEPEKEDIMVMDTKLKIIEILQFILNVRLDYRISCLLCIFKREFDESNSQTSETSSGNSSQEGPSNVPGALDFEHIEEQAEGIFGGSEENTPLDLDDHGGRTFLRVLLHLTMHDYPPLVSGALQLLFRHFSQRQEVLQAFKQVQLLVTSQDVDNYKQIKQDLDQLRSIVEKSELWVYKGQGPDETMDGASGENEHKKTEEGNNKPQKHESTSSYNYRVVKEILIRLSKLCVQESASVRKSRKQQQRLLRNMGAHAVVLELLQIPYEKAEDTKMQEIMRLAHEFLQNFCAGNQQNQALLHKHINLFLNPGILEAVTMQHIFMNNFQLCSEINERVVQHFVHCIETHGRNVQYIKFLQTIVKAEGKFIKKCQDMVMAELVNSGEDVLVFYNDRASFQTLIQMMRSERDRMDENSPLMYHIHLVELLAVCTEGKNVYTEIKCNSLLPLDDIVRVVTHEDCIPEVKIAYINFLNHCYVDTEVEMKEIYTSNHMWKLFENFLVDICRACNNTSDRKHADSILEKYVTEIVMSIVTTFFSSPFSDQSTTLQTRQPVFVQLLQGVFRVYHCNWLMPSQKASVESCIRVLSDVAKSRAIAIPVDLDSQVNNLFLKSHSIVQKTAMNWRLSARNAARRDSVLAASRDYRNIIERLQDIVSALEDRLRPLVQAELSVLVDVLHRPELLFPENTDARRKCESGGFICKLIKHTKQLLEENEEKLCIKVLQTLREMMTKDRGYGEKGEALRQVLVNRYYGNVRPSGRRESLTSFGNGPLSAGGPGKPGGGGGGSGSSSMSRGEMSLAEVQCHLDKEGASNLVIDLIMNASSDRVFHESILLAIALLEGGNTTIQHSFFCRLTEDKKSEKFFKVFYDRMKVAQQEIKATVTVNTSDLGNKKKDDEVDRDAPSRKKAKEPTTQITEEVRDQLLEASAATRKAFTTFRREADPDDHYQPGEGTQATADKAKDDLEMSAVITIMQPILRFLQLLCENHNRDLQNFLRCQNNKTNYNLVCETLQFLDCICGSTTGGLGLLGLYINEKNVALINQTLESLTEYCQGPCHENQNCIATHESNGIDIITALILNDINPLGKKRMDLVLELKNNASKLLLAIMESRHDSENAERILYNMRPKELVEVIKKAYMQGEVEFEDGENGEDGAASPRNVGHNIYILAHQLARHNKELQSMLKPGGQVDGDEALEFYAKHTAQIEIVRLDRTMEQIVFPVPSICEFLTKESKLRIYYTTERDEQGSKINDFFLRSEDLFNEMNWQKKLRAQPVLYWCARNMSFWSSISFNLAVLMNLLVAFFYPFKGVRGGTLEPHWSGLLWTAMLISLAIVIALPKPHGIRALIASTILRLIFSVGLQPTLFLLGAFNVCNKIIFLMSFVGNCGTFTRGYRAMVLDVEFLYHLLYLVICAMGLFVHEFFYSLLLFDLVYREETLLNVIKSVTRNGRSIILTAVLALILVYLFSIVGYLFFKDDFILEVDRLPNETAVPETGESLASEFLFSDVCRVESGENCSSPAPREELVPAEETEQDKEHTCETLLMCIVTVLSHGLRSGGGVGDVLRKPSKEEPLFAARVIYDLLFFFMVIIIVLNLIFGVIIDTFADLRSEKQKKEEILKTTCFICGLERDKFDNKTVTFEEHIKEEHNMWHYLCFIVLVKVKDSTEYTGPESYVAEMIKERNLDWFPRMRAMSLVSSDSEGEQNELRNLQEKLESTMKLVTNLSGQLSELKDQMTEQRKQKQRIGLLGHPPHMNVNPQQPA

SEQ ID NO: 636 - DNA, 3591 bp, Homo Sapiens
ttactgggcgtatggcgtacagacacgaggccggcgcccgggaggcggtgttcatccgcccgggaaaagagcgcctgttgctcgctgcccgcgtgtccctggctctctcgggaacccagcgccgaaggcgaggtgggcgcgggccgaaggaggtcctgggaggtcggcggcgcggagggatctccgcgggagccgttggggctgttggcctcgggctgaggtgcaaggaccaggactagggcgagggcagcggtccaagaaatagaaaacaatgactgggagagcccgagccagagccagaggaagggcccgcggtcaggagacagcgcagctggtgggctccactgccagtcagcaacctggttatattcagcctaggcctcagccgccaccagcagagggggaattatttggccgtggacggcagagaggaacagcaggaggaacagccaagtcacaaggactccagatatctgctggatttcaggagttatcgttagcagagagaggaggtcgtcgtagagattttcatgatcttggtgtgaatacaaggcagaacctagaccatgttaaagaatcaaaaacaggttcttcaggcattatagtaaggttaagcactaaccatttccggctgacatcccgtccccagtgggccttatatcagtatcacattgactataacccactgatggaagccagaagactccgttcagctcttctttttcaacacgaagatctaattggaaagtgtcatgcttttgatggaacgatattatttttacctaaaagactacagcaaaaggttactgaagtttttagtaagacccggaatggagaggatgtgaggataacgatcactttaacaaatgaacttccacctacatcaccaacttgtttgcagttctataatattattttcaggaggcttttgaaaatcatgaatttgcaacaaattggacgaaattattataacccaaatgacccaattgatattccaagtcacaggttggtgatttggcctggcttcactacttccatccttcagtatgaaaacagcatcatgctctgcactgacgttagccataaagtccttcgaagtgagactgttttggatttcatgttcaacttttatcatcagacagaagaacataaatttcaagaacaagtttccaaagaactaataggtttagttgttcttaccaagtataacaataagacatacagagtggatgatattgactgggaccagaatcccaagagcacctttaagaaagccgacggctctgaagtcagcttcttagaatactacaggaagcaatacaaccaagagatcaccgacttgaagcagcctgtcttggtcagccagcccaagagaaggcggggccctggggggacactgccagggcctgccatgctcattcctgagctctgctatcttacaggtctaactgataaaatgcgtaatgattttaacgtgatgaaagacttagccgttcatacaagactaactccagagcaaaggcagcgtgaagtgggacgactcattgattacattcataaaaacgataatgttcaaagggagcttcgagactggggtttgagctttgattccaacttactgtccttctcaggaagaattttgcaaacagaaaagattcaccaaggtggaaaaacatttgattacaatccacaatttgcagattggtccaaagaaacaagaggtgcaccattaattagtgttaagccactagataactggctgttgatctatacgcgaagaaattatgaagcagccaattcattgatacaaaatctatttaaagttacaccagccatgggcatgcaaatgagaaaagcaataatgattgaagtggatgacagaactgaagcctacttaagagtcttacagcaaaaggtcacagcagacacccagatagttgtctgtctgttgtcaagtaatcggaaggacaaatacgatgctattaaaaaatacctgtgtacagattgccctaccccaagtcagtgtgtggtggcccgaaccttaggcaaacagcaaactgtcatggccattgctacaaagattgccctacagatgaactgcaagatgggaggagagctctggagggtggacatccccctgaagctcgtgatgatcgttggcatcgattgttaccatgacatgacagctgggcggaggtcaatcgcaggatttgttgccagcatcaatgaagggatgacccgctggttctcacgctgcatatttcaggatagaggacaggagctggtagatgggctcaaagtctgcctgcaagcggctctgagggcttggaatagctgcaatgagtacatgcccagccggatcatcgtgtaccgcgatggcgtaggagacggccagctgaaaacactggtgaactacgaagtgccacagtttttggattgtctaaaatccattggtagaggttacaaccctagactaacggtaattgtggtgaagaaaagagtgaacaccagattttttgctcagtctggaggaagacttcagaatccacttcctggaacagttattgatgtagaggttaccagaccagaatggtatgacttttttatcgtgagccaggctgtgagaagtggtagtgtttctcccacacattacaatgtcatctatgacaacagcggcctgaagccagaccacatacagcgcttgacctacaagctgtgccacatctattacaactggccaggtgtcattcgtgttcctgctccttgccagtacgcccacaagctggcttttcttgttggccagagtattcacagagagccaaatctgtcactgtcaaaccgcctttactacctctaacctgcagaagacgatgcagccgcttttctttttgaaatgactttgggatttttttaagcttttatttactttttttttaactgttatctttctggatgaaacttgggaaggggattaggagatctagcattttatttctagcattgctattcaccggcttccttattttatacgtaaaaattaagattttatattttatcttcttgtttctcatagatattttgtgagcatttttttgtttattttgaagaaatgtggataagatacttggtagtataaaacagactctctgagagtatttgaaatgtgtttggagatttacttaaacgtactttcaggagtgagcaagtcctacttataaacctatattaactttatttttgagatacctgttttgaatttaaaggagataagaggcgtaaagtaggatgctcactacaaccataggtggggtttcagctcatatcttaaagataaaaggtactattatataacctatacacaagatacaggagaaaatatgcttgatttttatttggcaggggggctaggttgtatgggagtaaaaaaaacattgaaaatttttaaattgtccaaagaaacattttaagactctttaacaaaaaaggccatgagtaaatctctatattaacattactatttattttgttttggaactgggacatgattctatttgttataaaataaaattgatgtgattgtcaccttatttg

SEQ ID NO: 637 - protein, 861 aa, Homo Sapiens
MTGRARARARGRARGQETAQLVGSTASQQPGYIQPRPQPPPAEGELFGRGRQRGTAGGTAKSQGLQISAGFQELSLAERGGRRRDFHDLGVNTRQNLDHVKESKTGSSGIIVRLSTNHFRLTSRPQWALYQYHIDYNPLMEARRLRSALLFQHEDLIGKCHAFDGTILFLPKRLQQKVTEVFSKTRNGEDVRITITLTNELPPTSPTCLQFYNIIFRRLLKIMNLQQIGRNYYNPNDPIDIPSHRLVIWPGFTTSILQYENSIMLCTDVSHKVLRSETVLDFMFNFYHQTEEHKFQEQVSKELIGLVVLTKYNNKTYRVDDIDWDQNPKSTFKKADGSEVSFLEYYRKQYNQEITDLKQPVLVSQPKRRRGPGGTLPGPAMLIPELCYLTGLTDKMRNDFNVMKDLAVHTRLTPEQRQREVGRLIDYIHKNDNVQRELRDWGLSFDSNLLSFSGRILQTEKIHQGGKTFDYNPQFADWSKETRGAPLISVKPLDNWLLIYTRRNYEAANSLIQNLFKVTPAMGMQMRKAIMIEVDDRTEAYLRVLQQKVTADTQIVVCLLSSNRKDKYDAIKKYLCTDCPTPSQCVVARTLGKQQTVMAIATKIALQMNCKMGGELWRVDIPLKLVMIVGIDCYHDMTAGRRSIAGFVASINEGMTRWFSRCIFQDRGQELVDGLKVCLQAALRAWNSCNEYMPSRIIVYRDGVGDGQLKTLVNYEVPQFLDCLKSIGRGYNPRLTVIVVKKRVNTRFFAQSGGRLQNPLPGTVIDVEVTRPEWYDFFIVSQAVRSGSVSPTHYNVIYDNSGLKPDHIQRLTYKLCHIYYNWPGVIRVPAPCQYAHKLAFLVGQSIHREPNLSLSNRLYYL

SEQ ID NO: 638 - DNA, 11747 bp, Homo Sapiens
ttttgcagtagaagagtataaccatgtttcggaatagtctcaagatgctgcttactggtgggaaatcaagtcgtaaaaacaggtcaagtgatggagggagcgaggaaccaccggatcgaagacagtcaagtgtagactctcgccaaagccgctctgggcaaggtggcatctccacagaaagcgactgtgcttttgagccagactacgctgtcccgccacttccagtgagtgaaggtgatgctgaacaggagcttggcccccctccatctgtagatgaggcagcaaacacactcatgactcgtctgggtttcctccttggagagaaagtcacagaagttcagccaggtgaccaatacagcatggaagtacaggatgaaaatcagacctcagcaatcacccagcggataagtccttgttccactctgactagcagcactgcctctccaccagccagtagcccctgctctacactcccacccatcagtacaaatgcaactgccaaggactgcagctatggggctgttactagtccaacctctacccttgaaagcagagatagtggcatcattgctacattaacaagctattctgaaaatgtggaacgcacaaaatatgctggggaaagcagtaaagaattaggatctggaggaaacataaaaccttggcagtctcaaaaatccagcatggactcctgtttgtatcgagtagatgaaaacatgactgcttccacctatagtctgaataagatcccagagagaaatttggaaacagtgttatctcaatcagtacagtctattcctttgtatctcatgccacggccaaattcagtagcagccaccagctctgcccacttggaagaccttgcttacctggatgagcagagacatacacctttgagaacttctctacgaatgccaagacagagcatgggtggtgctcgcacacagcaggatttaagagttcgctttgcaccttataggcctccagatatctccttgaagcctctgctctttgaagtgcccagcatcactacagagtcagtgtttgttggccgagattgggttttccacgaaatagatgctcaacttcaaagttcaaatgccagcgtgaaccaaggagtagtgattgtgggaaacattggattcggcaaaactgccatcatctccagactggtggccctcagctgccatggtacaaggatgagacagatcgcctcagacagcccacatgcctcccccaaacatgtggatgccaacagagagctgccactcacacagccaccttcagcccactcatctatcaccagtggaagctgcccaggaactccggaaatgcgcaggcggcaggaggaggctatgcgaagactagcctcgcaggtggttgcctatcactattgtcaagcagataatgcctacacttgcttggtgccagaatttgtccacaatgttgctgccttgctctgccgctcacctcagctgacagcctatcgggagcagcttcttcgggaacctcacctgcagagcatgctgagccttcgttcctgtgttcaagaccccatggcctccttccggaggggagttctggagccactagaaaatctccataaagagagaaaaatcccagatgaagatttcatcattttaattgatggattaaatgaagcagaatttcacaaaccggattatggggatacaattgtatcgtttctgagtaaaatgatcggaaagtttccttcttggctcaaactaattgtaacagttaggaccagtttacaggaaattaccaagctgctgcctttccataggatttttttggatcgactagaagagaatgaagccatagaccaggacctgcaggcttacatcctgcaccggatacacagcagctcagagatccagaataacatttcacttaatggcaaaatggacaatactacatttggcaaactcagttctcatctcaagaccctcagtcaagggtcctatctatatctgaaacttacatttgacctcatagagaaaggctatctagtgttaaagagctctagctacaaagtagttcctgtttcgctctcagaggtttatttactccagtgcaatatgaagttcccaacccagtcttcctttgaccgggtgatgcctctcctgaatgtggcagtggcctctctccacccactgactgatgagcatatcttccaggccatcaatgctgggagcattgaaggcacactagaatgggaggattttcagcagagaatggagaacctctccatgttcctaatcaagcgcagagacatgactcgtatgtttgtacatccttcttttcgagaatggcttatctggagagaagaaggagagaaaaccaaatttctctgtgatccgaggagtggtcacacgttacttgccttctggttttcccgccaagagggaaaactaaaccgacagcagactattgaactgggacatcacatcctcaaagcacacatttttaagggtttgagtaaaaaagttggtgtatcatcctccatcctccaaggtctctggatctcttatagcacagaaggtctttccatggcactggcgtctttacgaaatctctacactccaaatataaaggtcagccgactgctgattttgggaggtgccaatattaattaccggacagaggttttaaataatgctccaattctatgtgttcagtcccatcttggttacacagaaatggtagccctgctgctggagttcggggccaacgtggatgcctcttctgaaagtggcctgactcccctgggatatgctgcagcagcagggtacctgagcattgtggtgctgctgtgcaagaaacgggccaaggtggatcatttggataagaacgggcagtgtgctttggttcatgctgcactccgaggtcatctggaggttgtcaagtttttgattcagtgtgactggacgatggccggccagcagcaaggagtatttaagaagagccatgccatccaacaggccctcattgctgcagccagcatgggttatactgagattgtctcctacctacttgatcttccagaaaaagatgaagaggaagtagagcgagcacagatcaacagctttgacagtctctggggagagacagccctaacagctgcagccggaaggggcaaactggaggtgtgccgtttgctcttggaacaaggggcggcagtggcccagccaaaccgccgaggagcagtgccactattcagcacagtgcgccagggccactggcagattgttgatcttttactcacccatggagctgatgtcaacatggcagacaagcagggccgcactcccctgatgatggctgcttccgaaggccatctaggaaccgtggactttctgcttgcacaaggtgcctccattgctcttatggacaaagaaggattgacagccctcagctgggcttgtttgaagggccatctctcagtagtacgttctctggtggataacggagctgccacagaccatgctgacaagaatggccgtaccccactggatctggcagctttctatggcgatgctgaggtggtccagttcctggtagatcatggggccatgatcgagcacgttgactacagtggaatgcgccctttggatagggcagtggggtgccggaacacttctgttgttgtcactcttctgaagaaaggagccaagataggtccagccacatgggcgatggccacctccaagccagacatcatgatcatcctgttgagcaagctgatggaagagggggacatgttttataagaaaggtaaagtaaaggaagctgcccagcgctaccagtacgccctgaagaagttccctagagaagggtttggtgaggacttgaaaactttccgggaactaaaggtgtctctcctcctcaacctctctcggtgtcgcaggaaaatgaacgattttggaatggcggaggaatttgctactaaggccctggagctgaaaccgaaatcttatgaagcttactatgcgagagcaagggcaaaacgcagcagcagacagttcgcagcagccttagaggacctgaacgaggccatcaagctgtgtcccaacaaccgtgagatccagagacttctgctgagagtggaagaagagtgtagacagatgcagcagccacagcagccaccgccgccaccgcagcctcagcagcagttgccggaagaagcagaacctgagccacagcatgaagacatatactctgtacaggatatattcgaggaggagtacctggaacaggatgttgaaaatgtttccattggcctccagacagaggcccggcccagccaggggctcccggtcatccagagcccaccctcctctcccccgcatcgggactcagcctacatctccagctcacctcttggctctcatcaggtttttgacttccggtccagtagttctgtaggctctcccactagacagacctatcagtccacctcacctgccctttctccaactcatcagaactcacattacaggcctagcccaccacacacttccccggctcatcagggaggatcttaccgtttcagcccccctcctgtgggaggacagggcaaagaatacccaagccctcccccttcccctctccggagaggccctcagtatcgggccagccctccagctgaaagtatgagtgtctatagatcccagtctggttcacccgtgcgctatcagcaggaaacaagcgtcagtcagcttcctggcagacccaaatctccattatccaaaatggcccagcggccctaccagatgcctcagctccctgtggcagttccccagcaagggctcaggctacagcctgccaaggcccagattgtgagaagtaaccagcccagcccagccgtccattcaagcaccgtcatccccacaggagcctatggccaagtagcccattcaatggccagtaaataccagtcttcacaaggagacataggagtcagccagagccggttggtttatcaagggtcaattgggggaatcgtaggggatggaaggccggtgcagcatgtccaagccagcctgagtgcaggcgccatctgtcagcatggaggattgaccaaagaggatcttccacagcgaccttcctcagcataccgaggtggcgtgagatacagccagacaccacagatcggacgcagccagtcagcatcctattacccagtctgtcactcaaaactagatctggagcgctcctccagccaactaggttcccctgatgtgtcgcatttaatcagaagacctatcagtgtcaaccctaacgaaatcaaaccgcacccgccaactcccaggccgttgctgcattcccaaagtgtaggccttcgcttctctccatctagcaatagtatctcctccacctccaacctaactccgaccttccggccatcttcttccatccagcaaatggagatcccactgaaacctgcatatgagaggtcatgtgacgagctgtcgccagtgtctccaactcaaggaggttaccccagtgagcccacccgatccaggaccacaccattcatggggatcatagataaaacagcacggactcagcagtacccccacctccaccagcagaatcggacctgggcagtgtcatctgtggacaccgtcctcagtcccacgtctccaggcaacctgcctcagcctgagtccttcagtccaccatcatccatcagcaacattgccttttataacaaaaccaacaatgcacagaatggccatttgctggaggacgattattacagcccccatgggatgctggctaacgggtctcgtggagacctcttggagcgagtcagccaggcctcctcctatcccgacgtgaaggtagctcggactctacctgtggctcaggcataccaggacaacctgtacaggcagctgtcccgagactctcggcaagggcagacatcccctatcaaaccaaagagaccgttcgtggagtctaatgtttaaaagacgttttgttggagtgagacccatatgttttcactgcacattttcaggcttggtttccacattcgaggtagttctctggcttaatttctcatgtagtttctgtgtggtgttcagaggtggcagcccacatgctgaaatcctttgcatgcagccgactgggaagcggcctcccgggagccaggacttcagtttctcttgtctgtgcccagccacatgctctctccctctcttcagatgccaacgaggagattttcgtgctgtgtgctttaacccagggagatcagacacactggtcagctttttccaggagacaatcgctttcactgatgttcttgttgtgtaattgtctttttccttttttaaaaaataaggtgttcttgttcgttttcttctagaaactttagaaagagtgcgatgcccctttgcctttgcatccttagccagtgtcacccacacagccagccgcagcgcattctcatgctgtggcccctccccagaccgccagcgccctgcagccaccaggtctgcagtgtgcattaggattattgctggtcttcctagggggtaaaaggatcagagagagaagaattaagtgctaaattggaagaaaaccccaatataattatgtaaaatgtcactacattgattttccaagaggcattgtaggaacatgtcaaaaacagccagccctttaaatattgcagtcagccaaggaaattagatgagaattgtggctattaagagaattcactgagagttattctctagatttttagccgacaattaaccactaaaagctgctgcttttccagggtgggggagggaatgaatacatagaaaaacaaaaaagattgttctggattctcagtgaaaggctataggaagtctgttctggagacatctactttttagatcctgatacatcactgagtgtcatactccactaaaaggaaactctaaccgaaggctggctggtgtgacaatcccgttagttggatcttcacctacagccagattttgttctagtggccctcttcctgtaaacccagatggtgtcatacagaaattgtttctttcagaagcagattggaatctcttgggaccatgagactgagtcccaatatttccacccagggtcatgcccgttgttgtctacttccattttgagatctatagtttgattatctattattacaggaactgtttcttttctttttctaggagtgtttatgagagtgtgatattttaaagtcagacgcagcaaaaactgtttcagggtgaagaaagacccctttcagccctgttttgcagccctgggtgggggcatgagatagacagcaagcttctgatcttgaagcttgtctagaagacacatcttctaggtctcgtggtcatttggtaggctgacctttgagtgagcgaggccactattgagtggatagcaagaacattggaaccaaagcctcggcacaggcctggcactggctgtacatcagctcttacaactaaacaactcaactaagcaactgaaacgaaacaaaggagcattcgttctctgttgttaggaatcattctgctctgttagggaagggctgcaggaagggcagtttcctgaataaaaatctggctgcgaccagtcccatgtgtctggtaagtaagtaagtaagtaagtgccctttgaagggatcattaagacacagggagcatgaacctgagatcagaagcatttctttactaatttagattctgcgaaatagacggacctctccacccccaaacctaaaacaggccaggacttgtctctgtgctgaaagcaaatagcaagactaactcaagccccagcctctttccacactccctgatacctaaggactgctttctcagctagaccagggtgggcatcagcgacgccttctcagctagaccagggtaggcatcagcgtcctctctccatctctatacccctctctctcacatcaggaagatgaaatgtgtagctctagcggcaacctctagccaggagcccagtggcctctcagattgctttttggccaggtctcagcactgctggcatctttacatcttactccttaaaaccgcctctcgctgaggagccactgcattttgaagaatttctcagtgtctgtcaggaaagtgctcctgctcatttggaacgccacacaccacccgcactcacctgtccaggcgaatgagcaggtcctgtagctttacaaatatgccgctgatgccgcttctccccagggtctctcagttttccaggacaaaaagatttagggcctataccctatgggcaaaacacctaaaatgtcaacagtcaaaatgccattctttttggccatcataagagggagtaggtatcactgctgcatgccagttgtttttgactagaatatgccaaccagagcttgttggggcaggagacgtttttccttacaagcagactgcctgtgccctgtgccctgtttgctacttcactgccatggaatgatccgagtactgtatttcagagctgccccttccccagcagcaaacactcgctgagtccatgtctggcttcaggtgggaggaaatgtttcagatgaaacttactcaattcataccaccctgaaatggaggacagaggtgacaaacttcagtttaataggtttctcaccaagttgtatgttccattggcccaggattcttgcactaatgggtttctatcacatcatgtctataaatgggtgcactttactgtttgaatttgtaactgaagtactggatatttaagtgtgagtaatgtcttcattagaaaatagcagaaccgctcttgtcttttagtgtatttttcaagaaaaaaggaaaggaaagacatcaagcagtggatcacaacatttatagcacaagaaataacttgtatataagcatcaaaaagattaagaattttttaatatgaaaaatatttgcagtgattttaaagtgcttttccagcaatgttcttagggactcctgagacacggttactttatctactggatcagtaaggcacacaattaacaattaacaattaatgtttatttacaaagtaaagggaaaacctgtgtaacatgagaatttggcatgacaaaatggagaccattttgtatctgctgttgtatcttgtccgggttgcagacgtgcactattaaagtcccaagttaatagagcacaaacccttctcgctcctcccccatgtgcccctctttttagatgtgtataacttaaactcgatggctcaggaaaattccactaattagaatcatgtacagtaccccaggtcgttgtccagatatacaagtttgctaatgtagttaagcctggattattaaacacttttcctaaattattgtaaacagaacagcttagagaaaggtattctcagtccttaatattgtatagtagtttatgagcccctctctaaatattggtatttttatattccagagatgtacccaatagaaaaaattaaaaattaatcagtatctaatttaatatccataagtatttttccttagattttagtcacgtacagtgggctatgtggatgtcacttgtgcttcaccatagtttaccactaggtgtcactgtggctctgcactgcgcttgttttgtagcaaagaacagcggcatcccctcgggagagaggagctgcttccagggcaacaggcaagcgggctcagaggttcaggagaaggcaacagaggcctggaaggggtcttcgtgcatctgtgccagttgtgcaagacgaactctttgaacactacatgctttggacttcagccaggcagaggctggaagaaggttgaccagagctcccttgctctggtagagggatgggtacatggagaagccccttcttccccatgagcctccctcctgtcagttcctctcagcctccagcttttataactccagaagcgtcacagttgggtggtttgattcagagagagttatttttctactgcagaaatgccttggacaaaaccagtgctcactgaatctttgccacaaaatggaataggctatcccagggggcaagaggtgcccgcccctgtgcccagcctcctcttgatgctcccagtgcccagcagcctcgcacaccctgcctgtctgttcctgggctgcccatttctcaagaaaccgacctgcaaaggcagccggctgctgcctccacaccgagggctgtgcggtcctgctgctcgctcactgggaggtgcagctctttctcctcttcctctaggaattccagaccgaccatctaccatgactaacaacaatgaacaaagggcttaggggcaagagctacctgcaaagacgtgtcatggaacccttcaccatgcaatgccttgaactcagctctggctgctcccaagaaaaggtggctggctgggggcctggacacaagcacaatggggctggtggagccactgtgcagagctacttgaataatcactgggttttcatcaactccttttgtcatacagaccactcaagggctgaagtgttggtaaccttcatttcggtgtccaaagcctcacagcaggtgagccaccctgagatgcttgtggccacatggtggccacagtcagagctttgaaagtcagtaccaaatgaacgcataattggacaccaaaaatcaagtgttactttcatgtttcctcaccccatcatctcattgcctcctgctgactctgataccgacgctgagctgacttgccaggctgccgctggacgcgtagagatcaggccagcgccgcgctcatttttccaggtagacctactctgtggaacggaagtgccctagctgctttgtttttgtagcacttgctggctgaatttttcttttgctaatcgctaaccagaaagtctggttagagggggctcaactcaatccctttggtccccagcgccagacaagagttaattctggaaaattcagtacttgaatgtacctgccttattgcataccaatttactggggggaaaaaaaaagttaagagatgccggctccagatctccacttcattcacaggtgattttggaaatcctgtaagttacacttcctgttctggttttgttttgttttttgtttcctttggctgattcctgctgagtgaggccagttcctcatcaggctcagggcaggtgccttttcaggcgtggcctcctttccatctagcacagcatctttgtctctgttctgtctcctccaaatccaagatgattttaattagtacagacatgtacagtctacaattaaagagtgatttgtactaatatgattttgattcttcctcctctttgctgtcctttcaagacacttgctggaaaaagctttaatgcacttagttttcctttaggttttctatgactcagatgtaaaggactttctctgtacagtatattatccaatgcatgtttgttctctctcctgatatattgaacaccacacagttgtgaagccgtgcagtggggatgccccacaccccacagaggcatctacccctgtgtataaggaaagacattttcctttgctgtacttgcttgagcagttttattgtctgtacatgtgagctgtgtgagatagatgtgaaaagttcaaatgaatgcattttcctgccccatgtatacagattgtcatctgtacaaggaactgtatgtatgaaagcaaatgtacttatttataaatggctaacacttggaaaacca

SEQ ID NO: 639 - protein, 1990 aa, Homo Sapiens
MFRNSLKMLLTGGKSSRKNRSSDGGSEEPPDRRQSSVDSRQSRSGQGGISTESDCAFEPDYAVPPLPVSEGDAEQELGPPPSVDEAANTLMTRLGFLLGEKVTEVQPGDQYSMEVQDENQTSAITQRISPCSTLTSSTASPPASSPCSTLPPISTNATAKDCSYGAVTSPTSTLESRDSGIIATLTSYSENVERTKYAGESSKELGSGGNIKPWQSQKSSMDSCLYRVDENMTASTYSLNKIPERNLETVLSQSVQSIPLYLMPRPNSVAATSSAHLEDLAYLDEQRHTPLRTSLRMPRQSMGGARTQQDLRVRFAPYRPPDISLKPLLFEVPSITTESVFVGRDWVFHEIDAQLQSSNASVNQGVVIVGNIGFGKTAIISRLVALSCHGTRMRQIASDSPHASPKHVDANRELPLTQPPSAHSSITSGSCPGTPEMRRRQEEAMRRLASQVVAYHYCQADNAYTCLVPEFVHNVAALLCRSPQLTAYREQLLREPHLQSMLSLRSCVQDPMASFRRGVLEPLENLHKERKIPDEDFIILIDGLNEAEFHKPDYGDTIVSFLSKMIGKFPSWLKLIVTVRTSLQEITKLLPFHRIFLDRLEENEAIDQDLQAYILHRIHSSSEIQNNISLNGKMDNTTFGKLSSHLKTLSQGSYLYLKLTFDLIEKGYLVLKSSSYKVVPVSLSEVYLLQCNMKFPTQSSFDRVMPLLNVAVASLHPLTDEHIFQAINAGSIEGTLEWEDFQQRMENLSMFLIKRRDMTRMFVHPSFREWLIWREEGEKTKFLCDPRSGHTLLAFWFSRQEGKLNRQQTIELGHHILKAHIFKGLSKKVGVSSSILQGLWISYSTEGLSMALASLRNLYTPNIKVSRLLILGGANINYRTEVLNNAPILCVQSHLGYTEMVALLLEFGANVDASSESGLTPLGYAAAAGYLSIVVLLCKKRAKVDHLDKNGQCALVHAALRGHLEVVKFLIQCDWTMAGQQQGVFKKSHAIQQALIAAASMGYTEIVSYLLDLPEKDEEEVERAQINSFDSLWGETALTAAAGRGKLEVCRLLLEQGAAVAQPNRRGAVPLFSTVRQGHWQIVDLLLTHGADVNMADKQGRTPLMMAASEGHLGTVDFLLAQGASIALMDKEGLTALSWACLKGHLSVVRSLVDNGAATDHADKNGRTPLDLAAFYGDAEVVQFLVDHGAMIEHVDYSGMRPLDRAVGCRNTSVVVTLLKKGAKIGPATWAMATSKPDIMIILLSKLMEEGDMFYKKGKVKEAAQRYQYALKKFPREGFGEDLKTFRELKVSLLLNLSRCRRKMNDFGMAEEFATKALELKPKSYEAYYARARAKRSSRQFAAALEDLNEAIKLCPNNREIQRLLLRVEEECRQMQQPQQPPPPPQPQQQLPEEAEPEPQHEDIYSVQDIFEEEYLEQDVENVSIGLQTEARPSQGLPVIQSPPSSPPHRDSAYISSSPLGSHQVFDFRSSSSVGSPTRQTYQSTSPALSPTHQNSHYRPSPPHTSPAHQGGSYRFSPPPVGGQGKEYPSPPPSPLRRGPQYRASPPAESMSVYRSQSGSPVRYQQETSVSQLPGRPKSPLSKMAQRPYQMPQLPVAVPQQGLRLQPAKAQIVRSNQPSPAVHSSTVIPTGAYGQVAHSMASKYQSSQGDIGVSQSRLVYQGSIGGIVGDGRPVQHVQASLSAGAICQHGGLTKEDLPQRPSSAYRGGVRYSQTPQIGRSQSASYYPVCHSKLDLERSSSQLGSPDVSHLIRRPISVNPNEIKPHPPTPRPLLHSQSVGLRFSPSSNSISSTSNLTPTFRPSSSIQQMEIPLKPAYERSCDELSPVSPTQGGYPSEPTRSRTTPFMGIIDKTARTQQYPHLHQQNRTWAVSSVDTVLSPTSPGNLPQPESFSPPSSISNIAFYNKTNNAQNGHLLEDDYYSPHGMLANGSRGDLLERVSQASSYPDVKVARTLPVAQAYQDNLYRQLSRDSRQGQTSPIKPKRPFVESNV

SEQ ID NO: 640 - DNA, 2021 bp, Homo Sapiens
gcagggatttggcaacctcagagccgcgaggaggaggcggagtcgcggagagtttgagtatttccgtccaatcaaaaggagactgtaagaggaggaggaggaggagatgactggggagcgggagctggagaatactgcccagttactctagcgcgccaggccgaaccgcagcttcttggcttaggtacttctactcacagcggccgattccgaggccaactccagcaatggcttttgcaaatctgcggaaagtgctcatcagtgacagcctggacccttgctgccggaagatcttgcaagatggagggctgcaggtggtggaaaagcagaaccttagcaaagaggagctgatagcggagctgcaggactgtgaaggccttattgttcgctctgccaccaaggtgaccgctgatgtcatcaacgcagctgagaaactccaggtggtgggcagggctggcacaggtgtggacaatgtggatctggaggccgcaacaaggaagggcatcttggttatgaacacccccaatgggaacagcctcagtgccgcagaactcacttgtggaatgatcatgtgcctggccaggcagattccccaggcgacggcttcgatgaaggacggcaaatgggagcggaagaagttcatgggaacagagctgaatggaaagaccctgggaattcttggcctgggcaggattgggagagaggtagctacccggatgcagtcctttgggatgaagactatagggtatgaccccatcatttccccagaggtctcggcctcctttggtgttcagcagctgcccctggaggagatctggcctctctgtgatttcatcactgtgcacactcctctcctgccctccacgacaggcttgctgaatgacaacacctttgcccagtgcaagaagggggtgcgtgtggtgaactgtgcccgtggagggatcgtggacgaaggcgccctgctccgggccctgcagtctggccagtgtgccggggctgcactggacgtgtttacggaagagccgccacgggaccgggccttggtggaccatgagaatgtcatcagctgtccccacctgggtgccagcaccaaggaggctcagagccgctgtggggaggaaattgctgttcagttcgtggacatggtgaaggggaaatctctcacgggggttgtgaatgcccaggcccttaccagtgccttctctccacacaccaagccttggattggtctggcagaagctctggggacactgatgcgagcctgggctgggtcccccaaagggaccatccaggtgataacacagggaacatccctgaagaatgctgggaactgcctaagccccgcagtcattgtcggcctcctgaaagaggcttccaagcaggcggatgtgaacttggtgaacgctaagctgctggtgaaagaggctggcctcaatgtcaccacctcccacagccctgctgcaccaggggagcaaggcttcggggaatgcctcctggccgtggccctggcaggcgccccttaccaggctgtgggcttggtccaaggcactacgcctgtactgcaggggctcaatggagctgtcttcaggccagaagtgcctctccgcagggacctgcccctgctcctattccggactcagacctctgaccctgcaatgctgcctaccatgattggcctcctggcagaggcaggcgtgcggctgctgtcctaccagacttcactggtgtcagatggggagacctggcacgtcatgggcatctcctccttgctgcccagcctggaagcgtggaagcagcatgtgactgaagccttccagttccacttctaaccttggagctcactggtccctgcctctggggcttttctgaagaaacccacccactgtgatcaatagggagagaaaatccacattcttgggctgaacgcgggcctctgacactgcttacactgcactctgaccctgtagtacagcaataaccgtctaataaagagcctacccccaactccttctgcaaaaaaa

SEQ ID NO: 641 - protein, 533 aa, Homo Sapiens
MAFANLRKVLISDSLDPCCRKILQDGGLQVVEKQNLSKEELIAELQDCEGLIVRSATKVTADVINAAEKLQVVGRAGTGVDNVDLEAATRKGILVMNTPNGNSLSAAELTCGMIMCLARQIPQATASMKDGKWERKKFMGTELNGKTLGILGLGRIGREVATRMQSFGMKTIGYDPIISPEVSASFGVQQLPLEEIWPLCDFITVHTPLLPSTTGLLNDNTFAQCKKGVRVVNCARGGIVDEGALLRALQSGQCAGAALDVFTEEPPRDRALVDHENVISCPHLGASTKEAQSRCGEEIAVQFVDMVKGKSLTGVVNAQALTSAFSPHTKPWIGLAEALGTLMRAWAGSPKGTIQVITQGTSLKNAGNCLSPAVIVGLLKEASKQADVNLVNAKLLVKEAGLNVTTSHSPAAPGEQGFGECLLAVALAGAPYQAVGLVQGTTPVLQGLNGAVFRPEVPLRRDLPLLLFRTQTSDPAMLPTMIGLLAEAGVRLLSYQTSLVSDGETWHVMGISSLLPSLEAWKQHVTEAFQFHF

SEQ ID NO: 642 - DNA, 2346 bp, Homo Sapiens
agaccgaacccgagggcgcccagggcgccgagggcgggactggactcggcttgggcgtgagatggcggcggcagcggtgagcagcgccaagcggagcctgcggggagagctgaagcagcgtctgcgggcgatgagtgccgaggagcggctacgccagtcccgcgtactgagccagaaggtgattgcccacagtgagtatcaaaagtccaaaagaatttccatctttctgagcatgcaagatgaaattgagacagaagagatcatcaaggacattttccaacgaggcaaaatctgcttcatccctcggtaccggttccagagcaatcacatggatatggtgagaatagaatcaccagaggaaatttctttacttcccaaaacatcctggaatatccctcagcctggtgagggtgatgttcgggaggaggccttgtccacagggggacttgatctcatcttcatgccaggccttgggtttgacaaacatggcaaccgactggggaggggcaagggctactatgatgcctatctgaagcgctgtttgcagcatcaggaagtgaagccctacaccctggcgttggctttcaaagaacagatttgcctccaggtcccagtgaatgaaaacgacatgaaggtagatgaagtcctttacgaagactcgtcaacagcttaaatctggattactacagccaaataatcagtgttttatatgagagtaaagcaaagtatgtgtatttttcccttgtcaaaaattagttgaaattgttcattaatgtgaatacagactgcattttaaaattgtaattatgaaataccttatataaaaccatctttaaaaaccaatagaagtgtgaatagtagaatattaattaaaatggaggctatcagcctgtgattttcagcttaacttcctggtgttaatgtgacaagttgatctgtctactttgcaatttaagttaaatatttatgaggaactgtgctccgactgagtgcgagaggaaggtaaacttgcgggagtgggcactgtatttcattacgcctttcatgacctggtctgtcctggcaggcacatggagacttggggactattaatttatttgttggtatttgctttggatacagaattccctaagaatattatctcacttcatcatgacttcctttacccactctagaattttatgttggacactttgtagcttttggtggttagtggagggaaaccttttatgatttaaatacttttactccactgattggttaccatcactgcatgtatcagcccttgatgagtttaagatctagtatcttataagttagaaattatttctgtttactcatggtttctgctttggaaatgaaatttgctgtgagttgaaagttggcagatggcaacacagctagggagcaataattttgttgtggggaggatttggtcatctccagaaacccgggagtcacgtggctctcttactcacactccatgtccatcctgtcaccaggtcttgttgattttgcctctgaaatgcctcttaaatctattctctcctttcaattttcctgtcactccttttgtccagccttttagcatttctaagctggactaggcgagagtgtcacacctgcttcccttggcttccatcttgcctcttccagtttatttctcaagctgcagtcaaactgatcttagaaaacacgaatctaatcatgcagcacccctgactaaggtcttccggtggctgttcagagcctcttgggtagcaaacagatggcttctgttgtatacaaagccccttaagagaggtctcctcatctactttttctagcctcttctctcccaactctgtattctcctgtaacactgactgagcactgcaggcttctgccctttgcacatagtaagcatgcatttctctctgtctgaaatgctctttctgttgttcatctagaagactgttttcccttgaagactcagccctagcatcacctcttctgtgaagtcttctgctactttcccaagcagagtgagtgttccttcccttgtctgagtggccttggccattgatgtgcttatcatgttgtcttacgtatcaaattatttgttgtcatatctgtccccttcaccatactgtgagctccaaagaaaagaagtgatctttatacttcttatgcttagtacacaactagacatatagtgtgtgtgtgagagagagaattttttaatgaaataattgaatacattggaagtgtttcattcaaaatactcatccattattctttggatagtagcataaatttgatgttttatgtacaaaagtaaaaacatttgaaaaataaaaaaaaaaa

SEQ ID NO: 643 - protein, 203 aa, Homo Sapiens
MAAAAVSSAKRSLRGELKQRLRAMSAEERLRQSRVLSQKVIAHSEYQKSKRISIFLSMQDEIETEEIIKDIFQRGKICFIPRYRFQSNHMDMVRIESPEEISLLPKTSWNIPQPGEGDVREEALSTGGLDLIFMPGLGFDKHGNRLGRGKGYYDAYLKRCLQHQEVKPYTLALAFKEQICLQVPVNENDMKVDEVLYEDSSTA

SEQ ID NO: 644 - DNA, 3341 bp, Homo Sapiens
ggaaggcagaagcaatctctgccgagagagtcagccgagcggccgcgcggagaggaggggcgggcggtccccaggcgggcgggtgcagggcgcagggcgccgacctgctggagagggggcccgggcgcgaggcggagtcccggcgcgcagccaggctggtggaggcccccggcaggctgcagattccctccggctccgggagccgcagcaggaccggccaggaggcgccatggaggggagccccatcccggtgctgacagtgcccaccgcgccctacgaggaccagcggccggccggcggcgggggtctgcggcgacccaccggcctcttcgagggccagcgcaactacctgcccaactttatccagagcgtgctgtcgtccatcgacctgcgcgaccgtcagggctgcaccatggtggtgggcagcgacggcaggtactttagcaggacggccatcgagatcgtggtgcagatggccgcggccaacgggattggacgactgattattggacagaatggcatcttgtcgacacctgcggtctcctgcattatcaggaagatcaaggcagctggtggaatcattctaacagccagccactgccctggaggaccagggggagagtttggagtgaagtttaatgttgccaatggaggtcctgcacccgatgttgtctcagacaaaatctaccaaatcagcaaaacgattgaggaatatgctatatgtcctgatctccgaatcgacctatctcgactaggaagacaagaatttgacctagaaaacaaattcaaaccattcagagtggagatagtggacccagtggatatctatcttaacctccttcggaccatctttgactttcatgccatcaagggtttgctgactggacccagccaactgaagattcgcattgacgcaatgcacggagttatgggaccttatgtgagaaaagttctgtgtgatgagctgggggccccagccaattctgcaataaactgtgttcccctggaagactttggagggcagcaccctgacccaaacctgacatatgcaacgactcttctggaagcaatgaaaggaggagaatatggatttggagctgcatttgatgctgatggggaccgttatatgatcctaggccaaaatggcttctttgtgagcccttctgactccctggccatcattgctgccaacctctcttgcattccatatttccgtcagatgggggtccgcgggtttgggaggagtatgccaaccagcatggccctggacagagtggccaaatcaatgaaggtccctgtatatgagaccccagctggatggagattcttctcaaatctgatggactcaggacgttgcaatctgtgtggggaagagagctttggcactggctctgaccacctccgagagaaggatggcctgtgggctgtcttggtctggctctccattattgctgcccggaagcagagtgtggaggaaattgtccgagatcactgggccaaatttggccgccactactattgcaggtttgactatgaggggttggatcccaagacgacatattatatcatgagggacctggaggccctggtcacagacaaatccttcattggccagcagtttgctgtggggagccatgtctacagcgtggcgaagacggatagttttgaatacgtggaccctgtggatggcactgtgaccaagaaacagggcctaaggatcattttctcggatgcatcacggctcatcttccggctcagttcctccagtggtgtgcgggccaccctcagactgtacgcagagagctacgagagggatcccagcggccatgaccaggagccacaggcagtgctgagccctctcatagccatcgcactgaaaatatcccagattcatgagagaactggccggaggggacccactgtcatcacctgaatagaggaaagatcactcaccagggccaaagagagtgctcagcgggagatgcttcactgatgccttcttgctacctgtttgtgcctcttatgactttggaaaaacaaaagatattttgcttttgggggatagagggtgggtgggaaaagaaaaaaaatccatttggttttggttttgtcctattcctccaaatgcagcagggcctttagttgtctgttaaagctgcactataatttggtatctacattttatcacacaaaggaacctccccttttgacaacaactgggctaggcagctgttaatcacaacatttgtgcatcacttgtgccaagtgagaaaatgttctaaaatcacaagagagaacagtgccagaatgaaactgaccctaagtcccaggtgcccctgggcaggcagaaggagacactcccagcatggaggagggtttatcttttcatcctaggtcaggtctacaatgggggaaggttttattatagaactcccaacagcccacctcactcctgccacccacccgatggccctgcctcccccatcccatccccaacatccctgtaccaccttctctcacatcttctaaagctttgtacaaatcacaatggtgcacttccaacaaaatatatcaataggtgttttcctctcttattttgtaaatagtattattttagctattaagctggataccttctttcaaattcagccattcagttgtaaagttgggaagaagtttcttgacaagactctgcaattaaatgcttaaaatttggaggggatccttccttgattacatcaagtatgttggtacatgggtttatacaagttcctcttgagaaggcaaaaagaccaccatgtgtgagagctctttgacttggccaataggggcctatcttaatgcacttgtttggacacatttctgatcttatttgtaaaggctgcaaaaggagaggatgaaatgctgtaaaagtaggaaatgaagtggaagctggaagaaaatgtaattggtggtacagctatgggccagatggtggaggggagggtggggacccctgccggcaagcagagtgtcacagctggctttcctcacttgggaaaagggtactgccggtctagcagcctcctctgtactcagccaggacacccagcgcgtgggacctgtttgtgtctgttttgcttccttgggaacggcacagtcactcaccctgccatttgcggaaatgacctggtgcactttgactgttaagcaatgcgttattgctgtagtcaaggttagtgcaagcaaggaaacattcccagtaaggtatttgtttccattttctgtctgtgcttctgtcagaaacttgctaggacatttagtggccaataaaaaagaaattcctaatttcaaccttaaaa

SEQ ID NO: 645 - protein, 567 aa, Homo Sapiens
MEGSPIPVLTVPTAPYEDQRPAGGGGLRRPTGLFEGQRNYLPNFIQSVLSSIDLRDRQGCTMVVGSDGRYFSRTAIEIVVQMAAANGIGRLIIGQNGILSTPAVSCIIRKIKAAGGIILTASHCPGGPGGEFGVKFNVANGGPAPDVVSDKIYQISKTIEEYAICPDLRIDLSRLGRQEFDLENKFKPFRVEIVDPVDIYLNLLRTIFDFHAIKGLLTGPSQLKIRIDAMHGVMGPYVRKVLCDELGAPANSAINCVPLEDFGGQHPDPNLTYATTLLEAMKGGEYGFGAAFDADGDRYMILGQNGFFVSPSDSLAIIAANLSCIPYFRQMGVRGFGRSMPTSMALDRVAKSMKVPVYETPAGWRFFSNLMDSGRCNLCGEESFGTGSDHLREKDGLWAVLVWLSIIAARKQSVEEIVRDHWAKFGRHYYCRFDYEGLDPKTTYYIMRDLEALVTDKSFIGQQFAVGSHVYSVAKTDSFEYVDPVDGTVTKKQGLRIIFSDASRLIFRLSSSSGVRATLRLYAESYERDPSGHDQEPQAVLSPLIAIALKISQIHERTGRRGPTVIT

SEQ ID NO: 646 - DNA, 1516 bp, Homo Sapiens
cacagcagctgtggctggggagcccagatgaagtgtggctctatcttgtatgtgagcacacccacattttcactgccattatctgggacagcagaaccaggtttggctcaacagatttctctttccacccatctattgcaggtgtagtggtcttgctgcttctccagggaggatctgcctacaaactggtttgctactttaccaactggtcccaggaccggcaggaaccaggaaaattcacccctgagaatattgaccccttcctatgctctcatctcatctattcattcgccagcatcgaaaacaacaaggttatcatcaaggacaagagtgaagtgatgctctaccagaccatcaacagtctcaaaaccaagaatcccaaactgaaaattctcttgtccattggagggtacctgtttggttccaaagggttccaccctatggtggattcttctacatcacgcttggaattcattaactccataatcctgtttctgaggaaccataactttgatggactggatgtaagctggatctacccagatcagaaagaaaacactcatttcactgtgctgattcatgagttagcagaagcctttcagaaggacttcacaaaatccaccaaggaaaggcttctcttgactgcgggcgtatctgcagggaggcaaatgattgataacagctatcaagttgagaaactggcaaaagatctggatttcatcaacctcctgtcctttgacttccatgggtcttgggaaaagccccttatcactggccacaacagccctctgagcaaggggtggcaggacagagggccaagctcctactacaatgtggaatatgctgtggggtactggatacataagggaatgccatcagagaaggtggtcatgggcatccccacatatgggcactccttcacactggcctctgcagaaaccaccgtgggggcccctgcctctggccctggagctgctggacccatcacagagtcttcaggcttcctggcctattatgagatctgccagttcctgaaaggagccaagatcacgcggctccaggatcagcaggttccctacgcagtcaaggggaaccagtgggtgggctatgatgatgtgaagagtatggagaccaaggttcagttcttaaagaatttaaacctgggaggagccatgatctggtctattgacatggatgacttcactggcaaatcctgcaaccagggcccttaccctcttgtccaagcagtcaagagaagccttggctccctgtgaaggattaacttacagagaagcaggcaagatgaccttgctgcctggggcctgctctctcccaggaattctcatgtgggattccccttgccaggctggcctttggatctctcttccaagcctttcctgacttcctcttagatcatagattggacctggttttgttttcctgcagctgttgacttgttgccctgaagtacaataaaaaaaattcattttgctccagtaaaaaaaaaaaaaaaaaa

SEQ ID NO: 647 - protein, 311 aa, Homo Sapiens
MLYQTINSLKTKNPKLKILLSIGGYLFGSKGFHPMVDSSTSRLEFINSIILFLRNHNFDGLDVSWIYPDQKENTHFTVLIHELAEAFQKDFTKSTKERLLLTAGVSAGRQMIDNSYQVEKLAKDLDFINLLSFDFHGSWEKPLITGHNSPLSKGWQDRGPSSYYNVEYAVGYWIHKGMPSEKVVMGIPTYGHSFTLASAETTVGAPASGPGAAGPITESSGFLAYYEICQFLKGAKITRLQDQQVPYAVKGNQWVGYDDVKSMETKVQFLKNLNLGGAMIWSIDMDDFTGKSCNQGPYPLVQAVKRSLGSL

SEQ ID NO: 648 - DNA, 1326 bp, Homo Sapiens
tggacaaatttgcgggctggggaccatggaagtggaggaaatctacaagcaccaggaagtcaagatgcaagcaccagccttcagggacaagaaacagggggtctcagccaagaatcaaggtgcccatgacccagactatgagaatatcaccttggccttcaaaaatcaggaccatgcaaagggtggtcattcacgacccacgagccaagtcccagcccagtgcaggccgccctcagactccacccaggtcccctgctggttgtacagagccatcctgagcctgtacatcctcctggccctggcctttgtcctctgcatcatcctgtcagccttcatcatggtgaagaatgctgagatgtccaaggagctgctgggctttaaaagggagctttggaatgtctcaaactccgtacaagcatgcgaagagagacagaagagaggctgggattccgttcagcagagcatcaccatggtcaggagcaagattgatagattagagacgacattagcaggcataaaaaacattgacacaaaggtacagaaaatcttggaggtgctgcagaaaatgccacagtcctcacctcaataaatgagaggacattgtggcagccaaagccacaacttggaagatggggctgcacctgccaacgaagacgggaaatgaccccccccccccagcctagtgtgaacctgcccctcgtcccacgtatagaaaaacctcgagtcatggtgaatgagtgtctcggagttgctcgtgtgtgtgtacacctgcgtgcgtgtgtgtgcgtgtgtgcgcgtgtgttcgtgtatgtgcgtgtgtgcgtgcgcgtgtgtgtgcattttgcaaagggtggacatttcagtgtatctcccagaaaggtgatgaatgaataggactgagagtcacagtgaatgtggcatgcatgcctgtgtcatgtgacatatgtgagtctcggcatgtcacggtgggtggctgtgtctgagcacctccagcagatgtcactctgagtgtgggtgttggtgacatgcattgcacgggcctgtctccctgtttgtgtaaacatactagagtatactgcggcgtgttttctgtctacccatgtcatggtgggggagatttatctccgtacatgtgggtgtcgccatgtgtgccctgtcactatctgtggctgggtgaacggctgtgtcattatgagtgtgccgagttatgccaccctgtgtgctcagggcacatgcacacagacatttatctctgcactcacattttgtgacttatgaagataaataaagtcaagggaaaacagcgtcaaaaaaaaaaaaaaaaaa

SEQ ID NO: 649 - protein, 187 aa, Homo Sapiens
MEVEEIYKHQEVKMQAPAFRDKKQGVSAKNQGAHDPDYENITLAFKNQDHAKGGHSRPTSQVPAQCRPPSDSTQVPCWLYRAILSLYILLALAFVLCIILSAFIMVKNAEMSKELLGFKRELWNVSNSVQACEERQKRGWDSVQQSITMVRSKIDRLETTLAGIKNIDTKVQKILEVLQKMPQSSPQ

SEQ ID NO: 650 - DNA, 4815 bp, Homo Sapiens
agtggcgtcggaactgcaaagcacctgtgagcttgcggaagtcagttcagactccagcccgctccagcccggcccgacccgaccgcacccggcgcctgccctcgctcggcgtccccggccagccatgggcccttggagccgcagcctctcggcgctgctgctgctgctgcaggtctcctcttggctctgccaggagccggagccctgccaccctggctttgacgccgagagctacacgttcacggtgccccggcgccacctggagagaggccgcgtcctgggcagagtgaattttgaagattgcaccggtcgacaaaggacagcctatttttccctcgacacccgattcaaagtgggcacagatggtgtgattacagtcaaaaggcctctacggtttcataacccacagatccatttcttggtctacgcctgggactccacctacagaaagttttccaccaaagtcacgctgaatacagtggggcaccaccaccgccccccgccccatcaggcctccgtttctggaatccaagcagaattgctcacatttcccaactcctctcctggcctcagaagacagaagagagactgggttattcctcccatcagctgcccagaaaatgaaaaaggcccatttcctaaaaacctggttcagatcaaatccaacaaagacaaagaaggcaaggttttctacagcatcactggccaaggagctgacacaccccctgttggtgtctttattattgaaagagaaacaggatggctgaaggtgacagagcctctggatagagaacgcattgccacatacactctcttctctcacgctgtgtcatccaacgggaatgcagttgaggatccaatggagattttgatcacggtaaccgatcagaatgacaacaagcccgaattcacccaggaggtctttaaggggtctgtcatggaaggtgctcttccaggaacctctgtgatggaggtcacagccacagacgcggacgatgatgtgaacacctacaatgccgccatcgcttacaccatcctcagccaagatcctgagctccctgacaaaaatatgttcaccattaacaggaacacaggagtcatcagtgtggtcaccactgggctggaccgagagagtttccctacgtataccctggtggttcaagctgctgaccttcaaggtgaggggttaagcacaacagcaacagctgtgatcacagtcactgacaccaacgataatcctccgatcttcaatcccaccacgtacaagggtcaggtgcctgagaacgaggctaacgtcgtaatcaccacactgaaagtgactgatgctgatgcccccaataccccagcgtgggaggctgtatacaccatattgaatgatgatggtggacaatttgtcgtcaccacaaatccagtgaacaacgatggcattttgaaaacagcaaagggcttggattttgaggccaagcagcagtacattctacacgtagcagtgacgaatgtggtaccttttgaggtctctctcaccacctccacagccaccgtcaccgtggatgtgctggatgtgaatgaagcccccatctttgtgcctcctgaaaagagagtggaagtgtccgaggactttggcgtgggccaggaaatcacatcctacactgcccaggagccagacacatttatggaacagaaaataacatatcggatttggagagacactgccaactggctggagattaatccggacactggtgccatttccactcgggctgagctggacagggaggattttgagcacgtgaagaacagcacgtacacagccctaatcatagctacagacaatggttctccagttgctactggaacagggacacttctgctgatcctgtctgatgtgaatgacaacgcccccataccagaacctcgaactatattcttctgtgagaggaatccaaagcctcaggtcataaacatcattgatgcagaccttcctcccaatacatctcccttcacagcagaactaacacacggggcgagtgccaactggaccattcagtacaacgacccaacccaagaatctatcattttgaagccaaagatggccttagaggtgggtgactacaaaatcaatctcaagctcatggataaccagaataaagaccaagtgaccaccttagaggtcagcgtgtgtgactgtgaaggggccgctggcgtctgtaggaaggcacagcctgtcgaagcaggattgcaaattcctgccattctggggattcttggaggaattcttgctttgctaattctgattctgctgctcttgctgtttcttcggaggagagcggtggtcaaagagcccttactgcccccagaggatgacacccgggacaacgtttattactatgatgaagaaggaggcggagaagaggaccaggactttgacttgagccagctgcacaggggcctggacgctcggcctgaagtgactcgtaacgacgttgcaccaaccctcatgagtgtcccccggtatcttccccgccctgccaatcccgatgaaattggaaattttattgatgaaaatctgaaagcggctgatactgaccccacagccccgccttatgattctctgctcgtgtttgactatgaaggaagcggttccgaagctgctagtctgagctccctgaactcctcagagtcagacaaagaccaggactatgactacttgaacgaatggggcaatcgcttcaagaagctggctgacatgtacggaggcggcgaggacgactaggggactcgagagaggcgggccccagacccatgtgctgggaaatgcagaaatcacgttgctggtggtttttcagctcccttcccttgagatgagtttctggggaaaaaaaagagactggttagtgatgcagttagtatagctttatactctctccactttatagctctaataagtttgtgttagaaaagtttcgacttatttcttaaagcttttttttttttcccatcactctttacatggtggtgatgtccaaaagatacccaaattttaatattccagaagaacaactttagcatcagaaggttcacccagcaccttgcagattttcttaaggaattttgtctcacttttaaaaagaaggggagaagtcagctactctagttctgttgttttgtgtatataattttttaaaaaaaatttgtgtgcttctgctcattactacactggtgtgtccctctgccttttttttttttttaagacagggtctcattctatcggccaggctggagtgcagtggtgcaatcacagctcactgcagccttgtcctcccaggctcaagctatccttgcacctcagcctcccaagtagctgggaccacaggcatgcaccactacgcatgactaattttttaaatatttgagacggggtctccctgtgttacccaggctggtctcaaactcctgggctcaagtgatcctcccatcttggcctcccagagtattgggattacagacatgagccactgcacctgcccagctccccaactccctgccattttttaagagacagtttcgctccatcgcccaggcctgggatgcagtgatgtgatcatagctcactgtaacctcaaactctggggctcaagcagttctcccaccagcctcctttttatttttttgtacagatggggtcttgctatgttgcccaagctggtcttaaactcctggcctcaagcaatccttctgccttggccccccaaagtgctgggattgtgggcatgagctgctgtgcccagcctccatgttttaatatcaactctcactcctgaattcagttgctttgcccaagataggagttctctgatgcagaaattattgggctcttttagggtaagaagtttgtgtctttgtctggccacatcttgactaggtattgtctactctgaagacctttaatggcttccctctttcatctcctgagtatgtaacttgcaatgggcagctatccagtgacttgttctgagtaagtgtgttcattaatgtttatttagctctgaagcaagagtgatatactccaggacttagaatagtgcctaaagtgctgcagccaaagacagagcggaactatgaaaagtgggcttggagatggcaggagagcttgtcattgagcctggcaatttagcaaactgatgctgaggatgattgaggtgggtctacctcatctctgaaaattctggaaggaatggaggagtctcaacatgtgtttctgacacaagatccgtggtttgtactcaaagcccagaatccccaagtgcctgcttttgatgatgtctacagaaaatgctggctgagctgaacacatttgcccaattccaggtgtgcacagaaaaccgagaatattcaaaattccaaatttttttcttaggagcaagaagaaaatgtggccctaaagggggttagttgaggggtagggggtagtgaggatcttgatttggatctctttttatttaaatgtgaatttcaacttttgacaatcaaagaaaagacttttgttgaaatagctttactgtttctcaagtgttttggagaaaaaaatcaaccctgcaatcactttttggaattgtcttgatttttcggcagttcaagctatatcgaatatagttctgtgtagagaatgtcactgtagttttgagtgtatacatgtgtgggtgctgataattgtgtattttctttgggggtggaaaaggaaaacaattcaagctgagaaaagtattctcaaagatgcatttttataaattttattaaacaattttgttaaaccat

SEQ ID NO: 651 - protein, 882 aa, Homo Sapiens
MGPWSRSLSALLLLLQVSSWLCQEPEPCHPGFDAESYTFTVPRRHLERGRVLGRVNFEDCTGRQRTAYFSLDTRFKVGTDGVITVKRPLRFHNPQIHFLVYAWDSTYRKFSTKVTLNTVGHHHRPPPHQASVSGIQAELLTFPNSSPGLRRQKRDWVIPPISCPENEKGPFPKNLVQIKSNKDKEGKVFYSITGQGADTPPVGVFIIERETGWLKVTEPLDRERIATYTLFSHAVSSNGNAVEDPMEILITVTDQNDNKPEFTQEVFKGSVMEGALPGTSVMEVTATDADDDVNTYNAAIAYTILSQDPELPDKNMFTINRNTGVISVVTTGLDRESFPTYTLVVQAADLQGEGLSTTATAVITVTDTNDNPPIFNPTTYKGQVPENEANVVITTLKVTDADAPNTPAWEAVYTILNDDGGQFVVTTNPVNNDGILKTAKGLDFEAKQQYILHVAVTNVVPFEVSLTTSTATVTVDVLDVNEAPIFVPPEKRVEVSEDFGVGQEITSYTAQEPDTFMEQKITYRIWRDTANWLEINPDTGAISTRAELDREDFEHVKNSTYTALIIATDNGSPVATGTGTLLLILSDVNDNAPIPEPRTIFFCERNPKPQVINIIDADLPPNTSPFTAELTHGASANWTIQYNDPTQESIILKPKMALEVGDYKINLKLMDNQNKDQVTTLEVSVCDCEGAAGVCRKAQPVEAGLQIPAILGILGGILALLILILLLLLFLRRRAVVKEPLLPPEDDTRDNVYYYDEEGGGEEDQDFDLSQLHRGLDARPEVTRNDVAPTLMSVPRYLPRPANPDEIGNFIDENLKAADTDPTAPPYDSLLVFDYEGSGSEAASLSSLNSSESDKDQDYDYLNEWGNRFKKLADMYGGGEDD

SEQ ID NO: 652 - DNA, 2935 bp, Homo Sapiens
ggagctggcgctgggaggggaggagcgcgcagcccgcgcgccgcagggccgggcggaaagtttttcctgacggagttttggctgcggcagcggcggcggcggccggagcgggccatggacgcgctcaagtcggcggggcgggcgctgatccggagccccagcttggccaagcagagctgggggggcggtggccggcaccgcaagctgcctgagaactggacagacacgcgggagacgctgctggaggggatgctgttcagcctcaagtacctgggcatgacgctagtggagcagcccaagggtgaggagctgtcggccgccgccatcaagaggatcgtggctacagctaaggccagtgggaagaagctgcagaaggtgactctgaaggtgtcgccacggggaattatcctgacagacaacctcaccaaccagctcattgagaacgtgtccatatacaggatctcctattgcacagcagacaagatgcacgacaaggtgtttgcatacatcgcccagagccagcacaaccagagcctcgagtgccacgccttcctctgcaccaagcggaagatggcacaggctgttaccctcaccgtagcccaggccttcaaagtcgcctttgagttttggcaggtgtccaaggaagagaaagagaagagggacaaagccagccaagagggaggggacgtcctgggggcccgccaagactgcaccccctccttgaagagcttggtcgccactgggaacctgctggacttagaggagacagctaaggccccgctgtccacggtcagcgccaacaccaccaacatggacgaggtgccgcggccacaagccttgagtggcagcagtgttgtctgggagctggatgatggcctggatgaagcgttttcgaggcttgcccagtctcggacaaaccctcaggtcctggacactggcctgacagcccaggacatgcattacgcccagtgcctctcgcctgtcgactgggacaagcctgacagcagcggcacagagcaggatgacctcttcagcttctgagggcccggggccagccggacacaagcggccctgacacgtgatggaccaaagccacctgctgcgggggagccagttctggggcccgcctgccacctctcccagccctcagcattgtcagcctgaagatcagagctgcagccagtcaggcaggggagagatttttcttttaagccctgctctttctctgagaaccaaaagatgccttgaatatttattcagtgacttctggcttatgctcagaagccagtctgcgtcaggcacgtctcctgctgcgtgacatgtgcagtgctgtaatcggctcccgcttgctctcctggagcaagctctgccctggctgtgggtatcaggactgtgaccaaagcatttctagtcccttctctctttctaaggacccaaatttccctgggggcatcctgcttcctgaaagctgttggatttcagtgatttttccccccaccccccagcacaggagagcacccacagccgcagaaggggaatgtgtcctcctgctctgcttcctcagggcccagcaggcgggggtttgagccctggaccccaggctcttagagactaaggggcagctcctgaccaaagacgatacagcttggcactttaaagcattaacagcaggtgtgaccctgagggctcctccatggtgctgcattgagtccagctttccttctgcccttcctccaggagaaggggcccaaggtccccgtggatggtctccacctgtgcttggaaccagtgtaactggctgctccctgctcccagggactgacacggggatcatctctgtgaccgccctccgtcgggcccctgcctgccttctcccctccacgcaaggctgtgctcttcctctggtttctgtgtgtccgtttgagtgtctgcgccccgcctccccatacttcctgggatgatgtgtgaaacctgacacctagatttatttggaaatattctatgaccactttacagatgaggaaacaggcctcaagcgtggaggggtagagtgaagagtagaacccaggtctgatgccaaagctgctttcttctctgcctcctcctcacgcaactcacacctccttttcttctagctttgttgtcctcccaggaaccaaaaaaccccagctattttctgaccaaaatgtgtttcataacaaaccatctggtgcctttccacacagaactggcaggagcctcgtgtcctgctagctgtctctcttgttgatttccgtgaaaatgcaagtgtttgaagtctgctcattccgagggtgaaacaaaatccaaccctgtcagaatcatgctgttctctttgctgacactgtgaccctgggtcgggacagaccagcagcaatctgtctttagaatcgctttccttcctccccttttgcccccgtggggctcccggcatcctgaaagccagcaaagcctccagcatcttttccatcctgaggtgcctcccagtggcctggcttgtcggagcaagtttcatcagccctagggaaaacacggccctcctgggaacctccttacctggagtaaccggacaccttagacggaggtgcctgagggtggggtgggatttgcagggtcattatcagaacatgaggataacttccttgcccctgctctgtagccacctccttggcaccggcctctatttgtcataaggcggcgtgggcgaggcctgacacaggccagccttggcacgaggggggccaggggttctgagaagcgctgccctgtgagagccacgctggccttcgtctccatctctggttgacgggctgtccgtgtgcctcctgtgtgtctgcagacaagtcttgctgtgctttatttgtgaaactttaatgaggaaaaaacaaataataaatgttctcgttttgaaactcaa

SEQ ID NO: 653 - protein, 308 aa, Homo Sapiens
MDALKSAGRALIRSPSLAKQSWGGGGRHRKLPENWTDTRETLLEGMLFSLKYLGMTLVEQPKGEELSAAAIKRIVATAKASGKKLQKVTLKVSPRGIILTDNLTNQLIENVSIYRISYCTADKMHDKVFAYIAQSQHNQSLECHAFLCTKRKMAQAVTLTVAQAFKVAFEFWQVSKEEKEKRDKASQEGGDVLGARQDCTPSLKSLVATGNLLDLEETAKAPLSTVSANTTNMDEVPRPQALSGSSVVWELDDGLDEAFSRLAQSRTNPQVLDTGLTAQDMHYAQCLSPVDWDKPDSSGTEQDDLFSF

SEQ ID NO: 654 - DNA, 2782 bp, Homo Sapiens
gggcggcgcggaggggcagggccagagggaagcgctttgttccgcgcgtggttcccgcgcctgggggtgcgcgggagaggcgcgaatccgagtgccgcgcgcggcccggggacttgcacgggcgtgcggggtggaaccgcaggaagcggagctctcgggttcccgccccgccccgccccgccggcggcggaggcagcgagcgcgagagcccagcggagtcgctgggagcctgaggcaccgagacacaaaggcaggcgggatgcgggagcaggcaaagggaaagcgaaagccgcgcgcccggccggtgactgggtgaaggcgccgcgcagctttcccgacgccggctgtacccggacctcctggtcgagcctggcgcgccgcagccatggccatcgctcaactggccacggagtacgtgttctcggatttcttgctgaaggagcccacggagcccaagttcaaggggctgcgactggagctggctgtggacaagatggtcacgtgcattgcggtggggctgcccctgctgctcatctcgctggccttcgcgcaggagatctcgattggtacacagataagctgtttctctccaagttctttctcctggcgtcaggctgcctttgtggattcatattgctgggcggctgttcagcagaagaactcactgcagagcgagtctggaaacctcccactgtggctgcataagtttttcccctacatcctgctgctctttgcgatcctcctgtacctgcccccgctgttctggcgtttcgcagctgctcctcatatttgctcagacttgaagtttatcatggaagaacttgacaaagtttacaaccgtgcaattaaggctgcaaagagtgcgcgtgaccttgacatgagagatggagcctgctcagttccaggtgttaccgagaacttagggcaaagtttgtgggaggtatctgaaagccacttcaagtacccaattgtggagcagtacttgaagacaaagaaaaattctaataatttaatcatcaagtacattagctgccgcctgctgacactcatcattatactgttagcgtgtatctacctgggctattacttcagcctctcctcactctcagacgagtttgtgtgcagcatcaaatcagggatcctgagaaacgacagcaccgtgcccgatcagtttcagtgcaaactcattgccgtgggcatcttccagttgctcagtgtcattaaccttgtggtttatgtcctgctggctcccgtggttgtctacacgctgtttgttccattccgacagaagacagatgttctcaaagtgtacgaaatcctccccacttttgatgttctgcatttcaaatctgaagggtacaacgatttgagcctctacaatctcttcttggaggaaaatataagtgaggtcaagtcatacaagtgtcttaaggtactggagaatattaagagcagtggtcaggggatcgacccaatgctactcctgacaaaccttggcatgatcaagatggatgttgttgatggcaaaactcccatgtctgcagagatgagagaggagcaggggaaccagacggcagagctccaaggtatgaacatagacagtgaaactaaagcaaataatggagagaagaatgcccgacagagacttctggattcttcttgctgatgatttttttccttgagctgtaaatctgtgacttctgcgacatgggatttaatttggctaaagcacccctgttggtttcacagctggtttgcaataaatggttcttggtggagatactgagcatgtcttattgagtccctaatggaaatggtgatcaacaaaaggttatggaagaatggtttatgaacttcccataggaagcacctgagagatagtaaactgcagcaagtaactatgtgtaagtcctcatcaaatgaaaagcagaaagacaagaacaattagtcaagagcagtagccctgtcagagcctcggagcaatacctttctgtacccgtggtgagacaagacccagagctactggaaaacaagcactttggaagatttgttttgttttcatggaataataatatgtcagggtataatttaacgtgagtttcttatgtgcccttaaagactgttagacaagaaaagcattcactggctaataatccataggtcgacctatgtcctaagttaggtgtaaggtccgatgccttggcccacactcgagctctctttacattgttagttgtcaaccttggctgatggaaatcccgtaaccactatttgttgcactgtgccttgaagggcagcaggcccaagtgctgctctgactgaaaactgagttaacaagatgaaatctaaaggatattcacagtgacttcaattcaggaagaatgcttccaaaagagcccagtggggaaatctgacatcacagaagacattaattcagtcactttcaaagagtttgtctacaggcggtttctctgttatcaaaggcatttgaaataggattttacttaaacaataatggaacacaggagtatttaaagtgaagaacactttgcctgaatgtgatcagggcacataagtgacattggcatgcttcatatggcgtgcttggagccagaaaaacttagcggtttattttgtttatatttaagcacagctttaaaaaattcattatcgtttattcagtgtccgaattgaggccatttgggaagaaaattctagcactggtggagaattatagaataaagattataaatggttggataagacaaaaaaaaaaaaaaaa

SEQ ID NO: 655 - protein, 426 aa, Homo Sapiens
MAIAQLATEYVFSDFLLKEPTEPKFKGLRLELAVDKMVTCIAVGLPLLLISLAFAQEISIGTQISCFSPSSFSWRQAAFVDSYCWAAVQQKNSLQSESGNLPLWLHKFFPYILLLFAILLYLPPLFWRFAAAPHICSDLKFIMEELDKVYNRAIKAAKSARDLDMRDGACSVPGVTENLGQSLWEVSESHFKYPIVEQYLKTKKNSNNLIIKYISCRLLTLIIILLACIYLGYYFSLSSLSDEFVCSIKSGILRNDSTVPDQFQCKLIAVGIFQLLSVINLVVYVLLAPVVVYTLFVPFRQKTDVLKVYEILPTFDVLHFKSEGYNDLSLYNLFLEENISEVKSYKCLKVLENIKSSGQGIDPMLLLTNLGMIKMDVVDGKTPMSAEMREEQGNQTAELQGMNIDSETKANNGEKNARQRLLDSSC

SEQ ID NO: 656 - DNA, 2782 bp, Homo Sapiens; identical to SEQ ID NO: 654

SEQ ID NO: 657 - protein, 426 aa, Homo Sapiens; identical to SEQ ID NO: 655

SEQ ID NO: 658 - DNA, 5370 bp, Homo Sapiens
cgcatgcgctggcggcctgcgccgccttaagtgccgcgccagcccggggcggcccagtcggcctgtcagccggcttcgagataagtcccggcgcttgcgcggcggcggctatggcggcggaggaggaggaggtggactctgccgacaccggagagaggtcaggatggctaactggttggctccccacatggtgccctacgtctatatcacaccttaaagaagctgaagagaagatgttaaaatgtgtgccttgcacatacaaaaaagaacctgttcgtatatctaatggaaataaaatatggacactgaagttctctcataatatttcaaataagactccacttgtccttctccatggttttggaggaggtcttgggctctgggcactgaattttggagatctttgcaccaacagacctgtctatgcttttgacctattgggttttggacgaagtagtagacccaggtttgacagtgatgcagaagaagtggagaatcagtttgtggaatccattgaagagtggagatgtgccctaggattggacaaaatgatcttgcttgggcacaacctaggtggattcttggctgctgcttactcgctgaagtacccatcaagggttaatcatctcattttagtggagccttggggtttccctgaacgaccagaccttgctgatcaagacagaccaattccagtttggatcagagccttgggagcagcattgactccctttaaccctttagctggcctaaggattgcaggaccctttggtttaagtctagtgcagcgtttaaggcctgatttcaaacgaaagtattcttcaatgttcgaagacgatactgtgacagaatacatctaccactgtaatgtgcagactccaagtggtgagacagctttcaagaatatgactattccttatggatgggcaaaaaggccaatgctccagcgaattggtaaaatgcaccctgacattccagtttcagtgatctttggcgcccgatcctgcatagatggcaattctggcaccagcatccagtccttacgaccacattcatatgtgaagacaatagctattcttggggcaggacattatgtatatgcagatcaaccagaagaattcaaccagaaagtaaaggagatctgcgacactgtggactgaacacactgaagctctgatgggaaaacctggtgactgatatagttgttcagcaataattcatagtctgtgatgaagagtagtgaatacaacacacaaccaggcagccttcttgactatactttgcacatgttttctttaggaattcactcacacatttaaaccagttagtgccttctagaagaatggctttcctttctcctacacaaaattgaaatatacaagtctctaaatataatacctttaaataaaaggttatttgtccctctgatgtactgaaaaactgtaatttttcagctgaaaattttttaatctaactttgctagttatttttatattgcaatctatattaccaatttaggaagtgatttctgagtctcttacactgtaaaggtgcactttattttctttgtcttccccatcatgtatttattgtgtcttgataactgatattaatctaaattcaatgtgtttttatgtaaaaatttgtcagttgtttagaatatttcactttgtttttgaaacggagtgacaaggcagatttttggttagaggacgggagttgatcactatcattactttttctagtttacctgttttttatatttaaggctgctaagccatgttcagcattttaaatgtggtctatcctgacatacagtgtataacaacataactccttggaacctcctatgtgtggtataattctactcttccaaggaacatgacttcaatactttcagtgattcaggtactgaaaagccttacctaaaaggctgttctttgtttccccctttcatactattcttttccatgacccaggatgcagcaaatgaaacagatttcttctcttaaggggatattaagactgttacttcctagtaagccaagtaataccatatttttattaacatctaacttttgtagatgggtgctaaaattgcatacattttaaccactaaaatagaaaaacaagtggtgctattatgtctcatggcaccagaaatgagctagcacttgggtttgttgttgctgttgtttattaagagtattgtgttaattaaatcattacatacttgaagttatattacaaaaattctagaaggttgattgaactatttttttaggaactaccatcaagtgtagcattttcttgcagttttaaaatgaggaaaacttctttgaaactgtgaaatgctccatgtggtaactggctgctgagaaaacccttcaccaaaaaaataaataaaaattgaataggattgtcatcaagaaggcatctttcgctaacgttgcttgtctaggagaaaggtagctatgtaaataaaaacagtgaactagagcaaatagtggtttaatggttttgttattgcatttttaaaatggttaattagggaatttgtagttgttaggaaatgtaaggttgtgtcactgttgattaactgccagaaagactgaatgttctattttcaacatttctcccctataaaagaatagacaaattatactgaagcatgatataaacatcttcccaatgaacaatttgtctcacttgtcagattaactaggttagtgcaggaagcaacatgagcgccaagatgtgttgtctgatttctctaccttaagaacaataatagtctttttagttagtattttggatggccaggtttcaaacctgtatgtggtacaaataatttgggtaatatttttgtatttttgttttacacactctctaatctcaattatcctttgctgggagaatgacaggtttcacttatacaggaaggtttttgcacaggaaatttggtcccagcccttggaaggaagaagttccttcgtttacttagtgaatggagtttctggccgcagatgtgccaagtgattgaagaaagatataccccaatatcaagtgataatttattttcctacagactgaatttgctttatttgaaagatgttgtaactctttttaaagttagattttaccctgaggtatagtatatgtaattttgtgaagattgagctggaagggaagttcacaatcctcacatttaaaaaaatatagtgggtgctaaatgttttcttaaaaatctagtacagcatttgatctttgttatgcacagcatacttttattttacagaataaattttcctgtgatagtcacaacaagacagctgtatagtttcttgagtcttttgtatggaccagtctctgtataatagttaactacaggactgtggatccagcaaatgttcagtaaatgctgctgttgttcttagggaaggctactctgggtgttgtggccgccatacatggctttacctgggtccatgcattcccttaagatgacttctgttttcttcttttttcttctgattttccaaaaaaaaaaaagccttgcctaaggttggttttagaatatgatttgcagaacacttttgaaatgtcttcattcatatatgtaatatatatttatacttaaagggccatacgcgatttcaataaaacaagaagtactggaaagaataaacaaaaatagccagaagatgcctagaaaagaacaatgtggaaggagggataaccctattaaatattataacataatgtttacaatatgagaaagtctaggaatttagtacatgataaagcatctcattcagagaaaaaggctttaaaaatggtgttgagagaagtgtggttaaccatttggaaaaaaaaataaaattgaatcgatttctcacaggatacacaggataaaatctgaatagaacaaagacccaatttttaaaatgaaaccctctttctaactagaagaaaacatagatgaattattgtataatctgacagtgagaaaaactttcctaggactgaaaattcagaagcaataaaaagagaagtctatagaagaattttcagccagatggaatggctcatggctgtaatcccagcattttgggaggctgaggcagaaggactgcttgagaccaggaattcaaaaccaacctgggcaacctagtaggactggctctaccaaaaaaaaaaaaaaaaaaaaattaagtacctggcctgggttccacctacttgggaggctgaggtaggaggactgtgagcccaggagtttgaggatgcagtaagccactgcactccagcctgggtgacagagaagaaaaaagatttttttggatagctgaaaatatttgcagcatttatcacagagggctaattgtagccctatatatgaagaattttaaactatgagaagaacccgaagaataggcaaaaggatgtgaacagacagttaacagaaaatagaatgcaaatggtctttaaacatacaaggatatgcataaaaagacaaatgcaaaataaaataaaataatggaaatacctttcttacctgtgagattggggaaaatccaagttaggcaatgcactctgttgagacaatagggaaacaggcactccaaaaattacaaatccctgtggatggtatttgttaactagcaaagttaaatgagtatatccttcaacctggcagacccagttctaagaatccatatgagatgcacttgcaagaatatgaaatagtatatgcacaaagatcttgattacagcactgtttctaatagctacagactggaagccagccaaatctccattgatagggaattgatggaaggaactagggtatatctatacaatgggatactacacagctgtagaaaggactgcgaactatttttgtagttctggtctggagaaatctccagaatataggaaatgaaaaatgtaaagcacagaagagaatgtatggtgtgctgtctgttgtataacgaagagacaaatggaaaaaatatgtatttgctttttttgtaaagcaatagaagaattagttataccaataactaataaaatgatctccttgttagtggtggtagggagctagacaaggatggcaactatttctgtatcttacataccttttattttgaggccctgtcaatgttttatataataaacattttttgaaaaggcaactcttaaaactaaaacaaacttaacagtctgtcaagttggtgatataaccccacagaagacttacttcaagtgacttgaaaacttagtattttgtctgtactttgctaatggaatatatcctacagaccaaacaaccacaaataaatcttaaactgcaaaaaaaaaaaaaaaaaa

SEQ ID NO: 659 - protein, 349 aa, Homo Sapiens
MAAEEEEVDSADTGERSGWLTGWLPTWCPTSISHLKEAEEKMLKCVPCTYKKEPVRISNGNKIWTLKFSHNISNKTPLVLLHGFGGGLGLWALNFGDLCTNRPVYAFDLLGFGRSSRPRFDSDAEEVENQFVESIEEWRCALGLDKMILLGHNLGGFLAAAYSLKYPSRVNHLILVEPWGFPERPDLADQDRPIPVWIRALGAALTPFNPLAGLRIAGPFGLSLVQRLRPDFKRKYSSMFEDDTVTEYIYHCNVQTPSGETAFKNMTIPYGWAKRPMLQRIGKMHPDIPVSVIFGARSCIDGNSGTSIQSLRPHSYVKTIAILGAGHYVYADQPEEFNQKVKEICDTVD

SEQ ID NO: 660 - DNA, 4548 bp, Homo Sapiens
gggactggaggctgccgagggggccggcgcccgagtccgggattcggccagtggtgctgagcgagtgctggaccagcggccgtcctgtgcacctggcctgtgcgcgtgcccgctgctcggcttcacccagactaaggcgcgggcagctgcgggaacaggcggggtgggcggagggagaccgggaggcacgggcgccctgtgcgcggaggaggtgaaggcggccggggccgggacgccatgtccatggaggaccccttctttgtggtgaaaggagaggtacagaaagcagtcaacactgcccagggattgtttcagagatggacagagctcctccaggacccctccacagcaacaagggaagaaatcgactggaccaccaacgagctgagaaataacctccggagcatagagtgggatctagaggaccttgatgaaaccatcagcatagttgaagcaaatcctagaaaatttaaccttgatgcaactgaattgagtataagaaaagccttcattacaagtactcggcaagttgtcagggacatgaaagatcagatgtcaacttcatctgtgcaggcattagctgaaagaaaaaatagacaggcactgctgggagacagtggcagccagaactggagcactggaacaacagataaatatgggcgtctggaccgagagctccagagagccaattctcatttcattgaggagcagcaggcacagcagcagttgatcgtggaacagcaggatgagcagttggagctggtctctggcagcatcggggtgctgaagaacatgtcccagcgcatcggaggggagctggaggaacaggcagttatgttggaagatttctctcacgaattggagagcactcagtcccggctggacaatgtgatgaagaaacttgcaaaagtatctcatatgaccagtgatcggcgccaatggtgtgccatagccatcctctttgcagtcctgttggttgtgctcatcctcttcttagtgctgtgacggcggggcctctgggtgcgagttcctcctgcatatgaaccgaggggaggaggagaagctgagcacgtgtgacattgccgtctactcacattcctatcctggaaacatactgctgcactgacttttctccgtgtgaccccacaattgacatggctcctccatcccagcgctggaagggccagtgggaagaggaaatagatgtctgcactcctggctgcagctggacaacagaagccccatgccgcctgtccagttcggaggagaactagctgctgccttgccttccgggacctcgtttgctgaggagggacttacagactccactggtgttttgctgttgctcattccatgcatctttggcagctcttttcttctgctcagacccttccccgtgctcagacagtgcaccgctgtcccatctaaagaaacctgtcaggaatacgagcttctgggtatgtttcgtttcccattgctgtagcatttcttatcccctgagagctgatgattattgaggacagaaggctcagaaacagtttgtgacagaaaatgcagtgtttcatttttcagggataaatgctaagataaaattgcttttccaggtcatttttttttgtggtaagaataactaatggaaaataatgaaacaccctggggtttgggggtgctaacaacttgtggctttaactgacaggagcaattaaaaagagcaagagggttctgcattggcatagcttagggaagggttaatgatgtcgccacaggtcagctcctgatccttgccgacttgatgttgctgtaccagggcttcctccccagaggtgcagcttgcgttttgagggtgattgctacatatgttgttgctaaacagctcagtaacacacttgaatgaatttggataccagattgtcctcattacagttcttttactcttagggcactctacactgggggttggggttgggagtggttagtacatttattacatttattaagaaacgtaatgacataaaaggttagctctgggccagacttctcttactctgtgggtaatggcaaggatgtgtaggtaaacttggttcttttttttccctaagatgacagcttgattttatcatctgcagtcaaataactgagccaatccaaatttaaatgatagatgctttaattgagtttaagtagctgaaactgctgagacactaaactttaaccttctgatgactttttaaaatgcctcaaatgtgcacatgtatataggatatttttataacttccctgatgaataatctgatattaaagtagtatttggacccagagccagaactcggtggtggaggctgctggtctctcctcaccaccttcttttgcacttggaaagaacagcaacatctggatagagttctggctttgacttctcatttccttgtctttttgggtgcattcctcagcacactttttttttaaacctttttgttttgttttgtttgtatttcatgtggttttatttgggggttttggttttttcacccttttttgtgatttgcaatgatgtgcttgcccagctaacttttgaattgcactttttaataaatattcttaacaatttttgaagaaggatattttatctcatttgagatcatggtaggttaagaaaatatgcctgttgatgaaagctaaaagcaaatttatgaaactaaaagggtgattgacatccatgtttacactccgctctaatgtttgatatataaataagttattttcaaattaggaaaaaacagtgagtattacaaagggcttcagatgtttagagtactaggttatttatgttttacaaagtttgaatcttctataaactaagaaaggggatgatccttagatttgcattaaaatatagaagtcttttaaagtaaatgtgaaccttgtctaagtactgtaatccacacaacacattataagaagcaaaccagcatcttaaggaattataaaattaccctatttaaaagccatgctattgttctgctattaccagatttattgtgccacacaaaaggatcatgtgtgtcagcaggggccgtttggaacaaacctagtcattaatgagtaagatactcctgttagttcagggaccaagttttatgacccagaggcttaatgatgtttggatatatttcaaatcggcgtgcttacctcactgatttaaattattttctaaatagtggccattgtagacctgactcaggctgaagctaaatagagaacaatttagaaagttaactaacaatacagtgcattctacccgtagggccaccatgcccttctgcccctggctgatttgatcctgtgtctgatcccattgcaccctgactgggcagtccctacagaaccagtgttaatttgaagggcctccactcaggctccaaatgtggcagccaaagagaacaatccagggaacctacatttatttttaaggacaaatatttcctcctcagtggtcctaatgttcagggctttagagggaacccaggtggtctcttcaccctgtgtcctagaatgggagagtaagtagacagtggtgataaccccacactgcttataagtgcatctttatagtatttggggctttcctacccctttagccttctgtacctagtaccatattccagttttaaagaactggcagaatgtgatggataacagaggaagagctcaatttatgtttattggaagaacattttacttaaatgatttgaggggtgggagggagtgaactactgagtttgccagagtgaaaatccatctgaaaaactcagctacctttagtttttagtcctcatttttggtcttgtctctgcggactgtgaagaatcacaatgctctatatgccctggactgtgtggcaaatgcaggttgcagcgtgtgtgttacatgaggatcttccacaatttcagaatgcacgccagagctgaagggggaaacttggtaacttgcccattattctctgcttttagccagagttaaacagactgatgggtctggtagccaacaacttggcaacttccactccttctcacctcgtgagattaagggctgtgaaaagaaatctagtctaactccaacagaaatctgtctctgttaagtgttttaccttctgtaagtagagatggtagagccaagatttttcttttggtaatttccctgtctataaagtgagaccaaagggatatctgttccctgttacctttttggagaattcataacatttgaagatcaaaaaattgaatgataaatatgaatggcttttcaattctgtggactttgtaccatttggcttcaccttgtactgcaagatgaatttgtaaacaaaacaaaattggactgtctggaaagctaaagttctgaaatatggaatgtactgcctctaatttttctttgtcttcctctcactggcatttttttctctcccaggtttcttaagaataatgttttttaaaggaggctttttgcccatcaagaataaaaagaaataaaaccaaaaaaaaaaaaaaa

SEQ ID NO: 661 - protein, 255 aa, Homo Sapiens
MSMEDPFFVVKGEVQKAVNTAQGLFQRWTELLQDPSTATREEIDWTTNELRNNLRSIEWDLEDLDETISIVEANPRKFNLDATELSIRKAFITSTRQVVRDMKDQMSTSSVQALAERKNRQALLGDSGSQNWSTGTTDKYGRLDRELQRANSHFIEEQQAQQQLIVEQQDEQLELVSGSIGVLKNMSQRIGGELEEQAVMLEDFSHELESTQSRLDNVMKKLAKVSHMTSDRRQWCAIAILFAVLLVVLILFLVL

SEQ ID NO: 662 - DNA, 3924 bp, Homo Sapiens
atggagccccgggctgccgcggcgggcgagccagagccgccggcggcgtcctcctccttccaggcccggctctggaagaacctgcagctgggggtgggcaggagcaagggcggcgggggcgggcgcgctgggggtccagagcgccgcactgcggacaccccgtcgccctccccgccacccccggtgggcacagggaatgcaccggccagggggagtggtgcaggcagcaggtggagcggcttcaagaagcggaagcaagtgctggaccgagtcttctcctcctcgcagcccaacctgtgctgctcgtcgccggagcccctggagcccggcggcgccggcagagccgagcaggggtccacgctacgccgccggatccgcgagcatttgctccccgccgtaaaggggcccgcggcggcctcgggagcagcgggagggacgcctcctggcggacgctcccccgactcagctccttcctcttcctccgcctcatcctccctgtcctcctcgccccagcctcccccgaggggggaccgcgcccgagatgagggtgcacggcgtcagggccccggggcgcacttgtgccaccagaagagctcctctctgccgggcaccgcctgcctggagcagctgctggagccgccgcctcctcccgcagagccggcgcggagtcccgcggagtctcgggccccggagacgggcgaggagcacggcagcagccagaaaataataaacactgctggaaccagtaatgcagaagtccccttggctgatcccggaatgtaccagctggacattacattaagaaggggtcaaagtttagctgctcgagatcgaggagggacgagtgatccatatgtgaagtttaaaatcggaggaaaagaagtttttagaagtaagataatacacaagaacctcaaccctgtgtgggaagaaaaagcttgtattctggttgatcatcttagggagccattgtatataaaggtatttgactatgattttggactacaggatgactttatgggctcagcctttctggatctgacacaattggagttaaacaggcccacagatgtgacccttactctgaaagatcctcattatcctgaccatgatcttggaatcattttgctctcagtcatccttacccctaaagaaggagagtccagggatgtgacaatgctaatgaggaagagttggaaaagatcaagtaaggaactttcagaaaatgaagtggttggatcttatttctctgtgaagtctctcttttggaggacgtgcggcaggccagctcttcctgtcctgggcttctgcagagcagagcttcagaatccttattgcaaaaatgtacaatttcagacccaaagtttacgcctatcagacctacacagaaaatcgcatctttggagaggaatagtcagcatcaccttgattgaagggagagacctcaaggccatggattccaacgggttgagcgatccctacgtgaagttccggcttgggcatcagaagtacaagagcaagattatgccaaaaacgttgaatcctcagtggagggaacaatttgattttcacctttatgaagaaagaggaggagtcattgatatcactgcatgggacaaagatgctgggaaaagggatgatttcattggcaggtgccaggtcgacctgtcagccctcagtagggaacagacgcacaagctggagttgcagctggaagagggtgagggacacctggtgctgctggtcactctgacagcatcagccacagtcagcatctctgacctgtctgtcaactccctggaggaccagaaggaacgagaggagatattaaagagatatagcccattgaggatatttcacaacctgaaagatgtgggatttctccaggtgaaagtcatcagagcggaagggttaatggctgccgacgtcactggaaaaagtgacccattttgtgtggtagaactgaacaacgatagactgctaacacatactgtctacaaaaatctcaatcctgagtggaataaagtcttcacgttcaacattaaagatatccattcagttcttgaagtgacagtttatgatgaagatcgggatcgaagtgctgactttctgggcaaagttgctataccattgctgtctattcaaaatggtgaacagaaagcctacgtcttgaaaaacaagcagctgacagggccaacaaagggggtcatctatcttgaaatagatgtgatttttaatgctgtgaaagccagcttacgaacattaatacccaaagaacagaagtacattgaagaggaaaacagactctctaaacagctgctactaagaaactttatcagaatgaaacgttgtgtcatggtgctggtaaatgctgcatactacgttaatagttgctttgattgggattcacccccaaggagtctcgctgcttttgtgctctttctctttgttgtctggaactttgagctctacatgataccactggttttgttgttactattgacatggaactacttcttgataatatcagggaaagataacaggcaacgtgatacagtagtggaggacatgctagaggacgaggaagaagaagatgacaaagatgacaaggacagtgaaaaaaagggatttataaataaaatctatgccatccaggaggtatgtgtcagtgtccagaacatcctagatgaagtggcttcctttggcgaaaggataaagaatactttcaactggactgtcccattcttaagctggctggccattgtagccctctgtgtgttcacagccatcctgtactgcattccgctgagatacattgtccttgtctggggcatcaataaatttacaaaaaagcttcggagtccatatgcaattgataacaatgaactacttgacttcctttccagagtcccttcagatgtacaagtggtgcaataccaagaactgaaaccagatccttctcatagcccatataaaagaaagaaaaacaatcttggctagccagctcccagcactgaggagaccagcatctgtttgggaagataaaagaaaaagccctcagcctcagcagcatttcctttctttctgctttttatttattttgcctttttatcatgatcgagagaatctgtaaatagtgtacaaaggcatatgtctttgaatatatacttctattgtacagactcaacttgataaaggttttgctactgctgtgtcaaaaccttgttagctgtggataataatataacacactgaaagaacaaatataagaatgataacactggaagatatattcttatctaattactagtggattaaatactcacctgtgctctgattaaatctacatcaattgtaaatgtcgatttgattttaaagtttttttttaatgcgactattttttatctgaaaagtaatccattacacttttctatgttttatacatttcaaaagggagggaaattccaaagcctgaataatggaatggatacatttcaatttaacatatattctggctttagatcccgacattcactcctgtgcaaattacttaggtatgacttaggctaattttaagctaataagtgaaggtacattcactccctcaagagaatcaatactcagaaggttacaaagttttctttatagaatttcaatcaatcattccatctaaaaccttaaaatctctacaggactacataacataaatactgccagtttataaacgattgcctatctgaatttttatacctaccactactttaatttatacagttagttagcaaattagcaacccagtaagtacagttatcaaaaatactaggaaactatatccatatcgcttttggtgtcagattgtatctgtgcatctaaaaatattttaataaatactcaagtgctctcagagaaaaaaaaaaaaaaaaa

SEQ ID NO: 663 - protein, 999 aa, Homo Sapiens
MEPRAAAAGEPEPPAASSSFQARLWKNLQLGVGRSKGGGGGRAGGPERRTADTPSPSPPPPVGTGNAPARGSGAGSRWSGFKKRKQVLDRVFSSSQPNLCCSSPEPLEPGGAGRAEQGSTLRRRIREHLLPAVKGPAAASGAAGGTPPGGRSPDSAPSSSSASSSLSSSPQPPPRGDRARDEGARRQGPGAHLCHQKSSSLPGTACLEQLLEPPPPPAEPARSPAESRAPETGEEHGSSQKIINTAGTSNAEVPLADPGMYQLDITLRRGQSLAARDRGGTSDPYVKFKIGGKEVFRSKIIHKNLNPVWEEKACILVDHLREPLYIKVFDYDFGLQDDFMGSAFLDLTQLELNRPTDVTLTLKDPHYPDHDLGIILLSVILTPKEGESRDVTMLMRKSWKRSSKELSENEVVGSYFSVKSLFWRTCGRPALPVLGFCRAELQNPYCKNVQFQTQSLRLSDLHRKSHLWRGIVSITLIEGRDLKAMDSNGLSDPYVKFRLGHQKYKSKIMPKTLNPQWREQFDFHLYEERGGVIDITAWDKDAGKRDDFIGRCQVDLSALSREQTHKLELQLEEGEGHLVLLVTLTASATVSISDLSVNSLEDQKEREEILKRYSPLRIFHNLKDVGFLQVKVIRAEGLMAADVTGKSDPFCVVELNNDRLLTHTVYKNLNPEWNKVFTFNIKDIHSVLEVTVYDEDRDRSADFLGKVAIPLLSIQNGEQKAYVLKNKQLTGPTKGVIYLEIDVIFNAVKASLRTLIPKEQKYIEEENRLSKQLLLRNFIRMKRCVMVLVNAAYYVNSCFDWDSPPRSLAAFVLFLFVVWNFELYMIPLVLLLLLTWNYFLIISGKDNRQRDTVVEDMLEDEEEEDDKDDKDSEKKGFINKIYAIQEVCVSVQNILDEVASFGERIKNTFNWTVPFLSWLAIVALCVFTAILYCIPLRYIVLVWGINKFTKKLRSPYAIDNNELLDFLSRVPSDVQVVQYQELKPDPSHSPYKRKKNNLG

SEQ ID NO: 664 - DNA, 2402 bp, Homo Sapiens
ttatgtttattgtcctgttcaaatccaagctctttcacacagaattgtacaagcaaagtttgagtaactaatcttggggtcatattccaatgtggctcccattaaagcatttcaaagagtgctagattcaggctcacatatgttacagcaacaggctatactctagggaaagaacaaaacagcttgataaaaactgtttccttttaagcatatttagacaaatatctatcctgtattctctttgccatctagattggagccatggctttggaacagaaccagtcaacagattattattatgaggaaaatgaaatgaatggcacttatgactacagtcaatatgaactgatctgtatcaaagaagatgtcagagaatttgcaaaagttttcctccctgtattcctcacaatagttttcgtcattggacttgcaggcaattccatggtagtggcaatttatgcctattacaagaaacagagaaccaaaacagatgtgtacatcctgaatttggctgtagcagatttactccttctattcactctgcctttttgggctgttaatgcagttcatgggtgggttttagggaaaataatgtgcaaaataacttcagccttgtacacactaaactttgtctctggaatgcagtttctggcttgtatcagcatagacagatatgtggcagtaactaaagtccccagccaatcaggagtgggaaaaccatgctggatcatctgtttctgtgtctggatggctgccatcttgctgagcataccccagctggttttttatacagtaaatgacaatgctaggtgcattcccattttcccccgctacctaggaacatcaatgaaagcattgattcaaatgctagagatctgcattggatttgtagtaccctttcttattatgggggtgtgctactttatcacagcaaggacactcatgaagatgccaaacattaaaatatctcgacccctaaaagttctgctcacagtcgttatagttttcattgtcactcaactgccttataacattgtcaagttctgccgagccatagacatcatctactccctgatcaccagctgcaacatgagcaaacgcatggacatcgccatccaagtcacagaaagcatcgcactctttcacagctgcctcaacccaatcctttatgtttttatgggagcatctttcaaaaactacgttatgaaagtggccaagaaatatgggtcctggagaagacagagacaaagtgtggaggagtttccttttgattctgagggtcctacagagccaaccagtacttttagcatttaaaggtaaaactgctctgccttttgcttggatacatatgaatgatgctttcccctcaaataaaacatctgcattattctgaaactcaaatctcagacgccgtggttgcaacttataataaagaatgggttgggggaagggggagaaataaaagccaagaagaggaaacaagataataaatgtacaaaacatgaaaattaaaatgaacaatataggaaaataattgtaacaggcataagtgaataacactctgctgtaacgaagaagagctttgtggtgataattttgtatcttggttgcagtggtgcttatacaaatctacacaagtgataaaatgacacagaactatatacacacattgtaccaatttcaatttcctggttttgacattatagtataattatgtaagatggaaccattggggaaaactgggtgaagggtacccaggaccactctgtaccatctttgtaacttcctgtgaatttataataatttcaaaataaaacaagttaaaaaaaaacccactatgctataagttaggccatctaaaacagattattaaagaggttcatgttaaaaggcatttataattatttttaattatctaagttttaatacaagaacgatttccctgcataattttagtacttgaataagtatgcagcagaactccaactatcttttttcctgttttttttaaatttgtaagtaattttataaaatccacctcctccaaaaaagcaataaaaaaaaaacaaactataataagcttttctgattcttttcaaaacattcctggtaagttcctaaagacataatttgcttctatgatgtcaactttcttactaataactggttatcatgacaaatgttaggtttatcatatatagtctaggtgtaatcctcagactatcattttcatctgggttccaatttcttaacttcctaaagaattcatctgtttatacaagtctaccactgccgattgactaaaaaatacattatcccatgcataaaatgtcctattttcatttaaacactttatttttgagtaataaaaatatgtaccacaataaattattgttaattaa

SEQ ID NO: 665 - protein, 350 aa, Homo Sapiens
MALEQNQSTDYYYEENEMNGTYDYSQYELICIKEDVREFAKVFLPVFLTIVFVIGLAGNSMVVAIYAYYKKQRTKTDVYILNLAVADLLLLFTLPFWAVNAVHGWVLGKIMCKITSALYTLNFVSGMQFLACISIDRYVAVTKVPSQSGVGKPCWIICFCVWMAAILLSIPQLVFYTVNDNARCIPIFPRYLGTSMKALIQMLEICIGFVVPFLIMGVCYFITARTLMKMPNIKISRPLKVLLTVVIVFIVTQLPYNIVKFCRAIDIIYSLITSCNMSKRMDIAIQVTESIALFHSCLNPILYVFMGASFKNYVMKVAKKYGSWRRQRQSVEEFPFDSEGPTEPTSTFSI

SEQ ID NO: 666 - DNA, 6804 bp, Homo Sapiens
gcagtgcaattccatgttcctcttaagtatgttagccctaccgggagctgagctggccagtctacttggagaggaaaagtagatctggggaaggtggaagggtcagttcctaagtgacttcctcctcggggatggtaagggcatttgctgatctccagtgactgcctggtgcctcatggtcagactcggctgtctcactcccagatatctgattttgcaaaaagggacacacctatctgcagcaaagaagacactgaccagattgcgagcggtgcttttggatgctctgtagccacccggggcccaggaggactgactcggcagcaggattcgtgcatgggaatcggagaccatggcagtgcagctggtgcccgactcagctctcggcctgctgatgatgacggagggccgccgatgtcaagtacatcttcttgatgacaggaagctggaactcctagtacagcccaagctgttggccaaggagcttcttgaccttgtggcttctcacttcaatctgaaggaaaaggagtactttggaatagcattcacagatgaaacgggacacttaaactggcttcagctagatcgaagagtattggaacatgacttccctaaaaagtcaggacccgtggttttatacttttgtgtcaggttctatatagaaagcatttcatacctgaaggataatgctaccattgagcttttctttctgaacgcgaagtcctgcatctacaaggagcttattgacgttgacagcgaagtggtgtttgaattagcttcctatattttacaggaggcaaagggagatttttctagcaatgaagttgtgaggagtgacttgaagaagctgccagcccttcccacccaagccctgaaggagcacccttccctggcctactgtgaagacagagtcattgagcactacaagaaactgaacggtcagacaagaggtcaagcaatcgtaaactacatgagcatcgtggagtctctcccaacctacggggttcactattatgcagtgaaggacaagcagggcataccatggtggctgggcctgagctacaaagggatcttccagtatgactaccatgataaagtgaagccaagaaagatattccaatggagacagttggaaaacctgtacttcagagaaaagaagttttccgtggaagttcatgacccacgcagggcttcagtgacaaggaggacgtttgggcacagcggcattgcagtgcacacgtggtatgcatgtccggcattgatcaagtccatctgggctatggccataagccaacaccagttctatctggacagaaagcagagtaagtccaaaatccatgcagcacgcagcctgagtgagatcgccatcgacctgaccgagacggggacgctgaagacctcgaagctggccaacatgggtagcaaggggaagatcatcagcggcagcagcggcagcctgctgtcttcaggttctcaggaatcagatagctcgcagtcggccaagaaggacatgctggctgccttgaagtccaggcaggaagctctggaggaaaccctgcgtcagaggctggaggaactgaagaagctgtgtctccgagaagctgagctcacgggcaagctgccagtagaatatcccctggatccaggggaggaaccacccattgttcggagaagaataggaacagccttcaaactggatgaacagaaaatcctgcccaaaggagaggaagctgagctggaacgcctggaacgagagtttgccattcagtcccagattacggaggccgcccgccgcctagccagtgaccccaacgtcagcaaaaaactgaagaaacaaaggaaaacctcgtatctgaatgcactgaagaaactgcaggagattgaaaatgcaatcaatgagaaccgcatcaagtctgggaagaaacccacccagagggcttcgctgatcatagacgatggaaacattgccagtgaagacagctccctctcagatgcccttgttcttgaggatgaagactctcaggttaccagcacaatatcccccctacattctcctcacaagggactccctcctcggccaccgtcgcacaacaggcctcctcctccccagtccctggagggactccgacagatgcactatcaccgcaacgactatgacaagtcacccatcaagcccaaaatgtggagtgagtcctctttagatgaaccctatgagaaggtcaagaagcgctcctctcacagccattccagcagccacaagcgcttccccagcacaggaagctgtgcggaagccggcggaggaagcaactccttgcagaacagccccatccgcggcctcccgcactggaactcccagtccagcatgccgtccacgccagacctgcgggtccggagtccccactacgtccattccacgaggtcggtggacatcagccccacccgactgcacagcctcgcactgcactttaggcaccggagctccagcctggagtcccagggcaagctcctgggctcggaaaacgacaccgggagccccgacttctacaccccgcggactcgtagcagcaacggctcagaccccatggacgactgctcgtcgtgcaccagccactcgagctcggagcactactacccggcgcagatgaacgccaactactccacgctggccgaggactcgccgtccaaggcgcgccagaggcagaggcagcggcagcgggcggcgggcgcactgggctcagccagctcgggcagcatgcccaacctggcggcgcgcgggggtgcggggggcgcggggggcgcggggggcggtgtgtacctgcacagccagagccagcccagctcgcagtaccgcatcaaggagtacccgctgtacatcgagggcggcgccacgcccgtggtggtgcgcagcctggagagcgaccaggagggccactacagcgtcaaggctcagttcaagacgtccaactcctacacggcgggcggcctgttcaaggagagctggcgcggcggcggcggcgacgagggcgacacgggccgcctgacgccgtcgcgatcgcagatcctgcggactccgtcgctgggccgcgagggcgcccacgacaagggcgcgggccgtgccgccgtctcagacgagctgcgccagtggtaccagcgttccaccgcctcgcacaaggagcacagccgcctgtcgcacaccagctccacctcctcggacagcggctcgcagtacagcacctcctcccagagcaccttcgtggcgcacagcagggtcaccaggatgccccagatgtgcaaggccacgtcagctgccttacctcaaagccagagaagctcgacaccgtcaagtgaaattggagccacccccccaagcagcccccaccacatcctaacctggcagactggagaagcaacagaaaactcacccattctggatgggtctgagtctccacctcaccaaagtactgatgaatagaggagctacaatgatagctgtttcctggattcctccctctatccagaactagctgatgtccagtggtacgggcaggaaaaagccaagcccgggaccctcgtgtgagccagcccggcctaatctgaccgcctcaacgccattctgagatcacctcactgcctctcatttgccttacccagacgcaccgtcaccctgcaccagctttggccctcagcactttttttctcctgtctccgcattccctcccccttgaaaacctgactgaggagacattctggaaggttccggtcccactgtgtgtcccctggcgctcttgcccatagagagccagacaccaatcctcaatggcaccttggtggcttccctctgccatgacagcccctaggccaggaaccatcaggggggccagccggcatccaattcctgcggataagtagcgttgggagagaacgggaaaggggacttgagttacagggtgacccagaaagacgattcagctgtgtccagcctgccacccatacgtaggccaaccaagcacttcatgaagaggaggcctcgtggcatattcagtttacacctgaaatattccttgatgggacagcttgtggggatggctatgggggaaggggaggttgagaaaggaagttctcgacaccagaaatgcatcggaggaccacaatcagttctatgctgccaaagattaaaaataaataaaaacataaaaaattaagaggggccaagaggaagacattctttctgcaaggaaatttcttttaaattctgaactgctactacacacaagtgaaagtcaaccctatgtaaactggtgtcctctctctagccctctcccttactggcccacttctctctccgtagagagcctgaaaaactgccccaatgccacggtaaaggcgaggaagtcttggctggcgttgctgactcacagtcgccatccatctggacacaaagagagacctgtgggagtcgtagagggtactgttagccccggtccatgcagggggttcagccgagcccaagactcaaagctgctttcctttcaggatttgtagtaacgtaaggtgataatggccaaaagtggttctctctcattaaaccaaccagtaaaagcgtatcctatttttttgcacaaggtgtttcattttcgtttttatgggaaaccaagggaaaagcacattgcgatccattcagtgtttaactgtcgtggctcattttctgttcgttagcacttgtgtgacaaaagagctcagatccgacttctcctatgtgtcacttattccaagaacccaactatgcccttaggtagaaagatttgactcgtgtgtctactagccaacaggcagagcagggttgaaaaaaatatcagctcccaaagggcccatgtgtctacatcatcagttactgtcatgcaccacatttgtgtgcagataccaaaagaggaggaaagaagaaaaaaattaatgtgtgggagctgcacgtttacatgttttgagctatgcttcaaacacaactggaaagccatcaatcttcaaaggcctcaaaaatacttttatagtaacaagtgcacgactttagttgggttattcaagatggcacaaaaaggtttccgcagaggtggtatgctgtgcttttggcgcaagtggtggggggatggggtgggggtggaatttttttctcactctaatgacttcctattggaaaggcattgacagccagggacaggagccagggtgggggtagttttgtgggaaagcagaactgaagttagcttaagcataaaaacaaagaaaaatcttcgcttttcatgtatgtggaatccaagaataaccataggctctaccagaccagaagggtaaggatggacactaaaatgaaacaaataccaaggtattccttctgctgcagcctggagaccaccgagagtcgagctggggcacacacacacctggccgggacccggcagggacaaggcgggccgtggcctcctccaccaagtctctctagacaattcagggcctgctttccccagctccatgcatggctggactggtgattccagggtgcagaagggattcatattcccagaacgctttaagtgtacacctgcaggataaagagataccggttacattattaaatgattctagggattcactgggggatatttttgttgcttttactttcatggttagagctacaaagaacagtgattttttttttttctcccttccccattcagaaacattatacattgggccatttttctttctcccaaagaagattcatggatagtcagactgaactgtgtgcaacaggaaaagtcaaaagggaaaaggtagctgatgaggttacatggttacatgttctacatcatgcatagtagcttgaaatctagtctggagaaaactggatcaagattctagcccactggagttgcaaggaatgagaggcaaaaattctaaagatttgggttatattttcaacttgggggacagagagaaatggagagcaggaattacagttccaacaaacatcatgatagtctggtagtcaagacagagattaagtaaaacaggttttactgtttagctgagttcagttaatacaaaatgtacataaaacgttagtcctttgagactgacatgattaatgatcagtgtggtgggaaatgatgtagttattgtacacaagcacttgcaaactctttatccctatttctttaaaacaaaataaggtgaaatacgaagtccttggtctgatataaagcccctattggattcttcggatgcgtaaaagaaattgcctgtttcagccagaagactggtgaaaacacatacatcagactatgttgtgagccaggttgattttttattttattatatgcaggtgagtgttgaaactgttaaaattccaatttgttttcattcagtattagtttagttctaaatatagcaaaccccatccaggtgctatcagatgaccagttactgcttagttaactaggtgtaaagttttacatatacattaatgtcaatagtttattacaagttgtgtaaaatggactctagtttaataatgggggaaaaaagattaggttgctcctgaaactgactgtagagcatgtaaaatgattttactggattctgttcaactgtaatcaatgaaaaagatgtacgttgtagacaaagttgcagaattaaaaaaagaaatctgcttttaatttattctttttgtattaagaatttgtatagtacctttacattttgcaaaacagtgttgtcaacacttattaaagcattttcaaaatgaaaaga

SEQ ID NO: 667 - protein, 1039 aa, Homo Sapiens
MAVQLVPDSALGLLMMTEGRRCQVHLLDDRKLELLVQPKLLAKELLDLVASHFNLKEKEYFGIAFTDETGHLNWLQLDRRVLEHDFPKKSGPVVLYFCVRFYIESISYLKDNATIELFFLNAKSCIYKELIDVDSEVVFELASYILQEAKGDFSSNEVVRSDLKKLPALPTQALKEHPSLAYCEDRVIEHYKKLNGQTRGQAIVNYMSIVESLPTYGVHYYAVKDKQGIPWWLGLSYKGIFQYDYHDKVKPRKIFQWRQLENLYFREKKFSVEVHDPRRASVTRRTFGHSGIAVHTWYACPALIKSIWAMAISQHQFYLDRKQSKSKIHAARSLSEIAIDLTETGTLKTSKLANMGSKGKIISGSSGSLLSSGSQESDSSQSAKKDMLAALKSRQEALEETLRQRLEELKKLCLREAELTGKLPVEYPLDPGEEPPIVRRRIGTAFKLDEQKILPKGEEAELERLEREFAIQSQITEAARRLASDPNVSKKLKKQRKTSYLNALKKLQEIENAINENRIKSGKKPTQRASLIIDDGNIASEDSSLSDALVLEDEDSQVTSTISPLHSPHKGLPPRPPSHNRPPPPQSLEGLRQMHYHRNDYDKSPIKPKMWSESSLDEPYEKVKKRSSHSHSSSHKRFPSTGSCAEAGGGSNSLQNSPIRGLPHWNSQSSMPSTPDLRVRSPHYVHSTRSVDISPTRLHSLALHFRHRSSSLESQGKLLGSENDTGSPDFYTPRTRSSNGSDPMDDCSSCTSHSSSEHYYPAQMNANYSTLAEDSPSKARQRQRQRQRAAGALGSASSGSMPNLAARGGAGGAGGAGGGVYLHSQSQPSSQYRIKEYPLYIEGGATPVVVRSLESDQEGHYSVKAQFKTSNSYTAGGLFKESWRGGGGDEGDTGRLTPSRSQILRTPSLGREGAHDKGAGRAAVSDELRQWYQRSTASHKEHSRLSHTSSTSSDSGSQYSTSSQSTFVAHSRVTRMPQMCKATSAALPQSQRSSTPSSEIGATPPSSPHHILTWQTGEATENSPILDGSESPPHQSTDE

SEQ ID NO: 668 - DNA, 644 bp, Homo Sapiens
tcaccaaggagaggagaggagacaggaccatgtggctgtccccatctctgctgcttctcatcctcccaggttactccattgccgctaaaatcactggtccaacaacagtgaatggctcggagcagggctcattgactgtgcagtgtgcttatggctcaggctgggagacctacttgaagtggcggtgtcaaggagctgattggaattactgtaacatccttgttaaaacaaatggatcagagcaggaggtaaagaagaatcgagtttccatcagggacaatcagaaaaaccacgtgttcaccgtgaccatggagaatctcaaaagagatgatgctgacagttattggtgtgggactgagagacctggaattgatcttggggtcaaagttcaagtgaccattaacccaggcacacaaactgcagtctcagaatggacaaccacaacagcaagcctggctttcacagctgcagccacccagaagaccagcagccccctcaccaggtccccgctcaagagcacccacttcctgttcctgttcctcctggagctgcctctgctcctgagcatgctggggaccgtcctctgggtaaacagaccacaaagaaggtcttgaaggaggaggagtcagcccgatgatgagagt

SEQ ID NO: 669 - protein, 194 aa, Homo Sapiens
MWLSPSLLLLILPGYSIAAKITGPTTVNGSEQGSLTVQCAYGSGWETYLKWRCQGADWNYCNILVKTNGSEQEVKKNRVSIRDNQKNHVFTVTMENLKRDDADSYWCGTERPGIDLGVKVQVTINPGTQTAVSEWTTTTASLAFTAAATQKTSSPLTRSPLKSTHFLFLFLLELPLLLSMLGTVLWVNRPQRRS

SEQ ID NO: 670 - DNA, 2833 bp, Homo Sapiens
ttagcacagtgactacaggaatcacagcccagacacaaaagcaggaaaccctttgaccgggctccttcctattgcaccaacagccttgtgttgctgcaatgaaaacacttccccaagcagctgtggccaagagacgcagaaactgccttgtccacgggccccgcctcagactccaacactcacaagagagcagaggagccccaagtcttggggaccacagaagatgccatgtgctccacgatgtcggcccccacctgcctggcccacttgcctccctgcttcctgctgctggcactggtccttgtcccctcagatgcctctgggcagagcagcaggaatgactggcaggtgctacagcccgagggccccatgctggtggcagaaggtgagacacttctactgaggtgtatggtggtcggctcctgcactgatggtatgataaaatgggtgaaggtgagcactcaggaccaacaggaaatttataactttaaacgtggctccttccctggggtaatgcccatgatccaacggacatcagaaccactgaattgtgattattccatctatatccacaatgtcaccagggagcacactggaacctaccactgtgtgaggtttgatggtttgagtgaacactcagaaatgaaatcggatgaaggcacctcagtgcttgtgaagggagctggggaccctgaaccagacctgtggatcatccagccccaggaattggtgttggggaccactggagacactgtctttctgaactgcacagtgcttggagacggtccccctggacccatcaggtggttccagggagctggtctgagccgggaggccatttacaactttggaggcatctcccaccccaaggagacagcggtgcaggcctccaacaatgacttcagcattcttctgcaaaacgtctccagtgaggatgcaggcacctattactgtgtaaagtttcagaggaaacccaacaggcaatacctgtctggacagggcaccagcctgaaagtgaaagcaaaatctacctcttccaaagaggcagaattcaccagtgaacctgcaactgagatgtctccaacaggcctcctggttgtgttcgcacctgtggtcctggggctgaaggcaattaccttggctgcactcctactggccctggctacctctcggaggagccctgggcaagaagatgtcaagaccacaggcccagcaggagccatgaacaccttagcatggagcaagggtcaagagtgaggggtcagccccagagtgaggaccctctgagttggagaggagccagggctcctcaaccatttccctacctccagtcccagcctctaggtgcccccaggcctcatgacaaactcctagatccctacatctggttttggtccacctagtgaaattcccttctttgcaccgggcttccctctaaaatgtctccctttctctttttggcctgttcaagacctccttgcttttcagtccctggctcagtctctcctcaacacccttgcccctgctgcagccctttctggtgcgccctgcccctttccccacctcgctacatccttcttggcctccaacatccaactcagagtcttcttcccaggagatgtctgtaagaatctctgaactcaaccagccagaccatctgtgcccctccatctacacctttctccccactccttcctgccttccttccatccccctcatggctggcttgggcaggtataatattagaatgcaggttcagcaactataacaaagctcttaaataacagtggcttaaaccagtggaaatcaaccagaaagttgaccatcagcaggccaagcaatacagagactccctggtattgagacccaggattcactgatctcattgctaccaggtccaccttctaggcagccagactggaaaagagggcaggaaaggggagcaggaccctcccctttaagtgcacagtcaggaacttggccacctcacttatctctacttggctggaatgtggtcacatggtcacacctagctgcaagaaacactgggagatgtagtctttatttctggcagcaatgcgcccagctgcaagttttcactagagaaaccagatggcagatatcaggggataaccagttatctccaccacagcagcatacagacagcctctcacctgccctgtgggacacctgagttcaatgcccagctagctagccagcacttcttcccactatcacctcccctggggcagcatgatgtggggcagtagttcccaagatgagtgattttgcccccactggacttttggcaatgtctagagatgtttttggttggcacaacctgggggggtgctaccaccatctagtggactgagaagccctgacatggggaagagtgtgcatgcccaggagtcagacacacctgcctttaaccctgaggcctctgcctcctccctgtgcaccctcagtgactaatcagagtcccttcccatcacggaacatccaggatactaatgtggacttctctgcattgtgtaagaaccaattcaagaccaggcacggtggcttatgcatgtaatcccagcactttgggaggccgaggtgggtggatcacctgagttcaggagtttgagaccagcctggctaacatggtgaaacctcgtctctactaaaaatacaaaaaattagccaggcgtggtggtgtgcacctgtaatcccagctacttgggaggatggggcaggagaaccgcttgaactgggaggcagaggctgcagtgagctgagatcgcgccattgcactccagcctgggcaacaagagcaaaactccgtctc

SEQ ID NO: 671 - protein, 342 aa, Homo Sapiens
MCSTMSAPTCLAHLPPCFLLLALVLVPSDASGQSSRNDWQVLQPEGPMLVAEGETLLLRCMVVGSCTDGMIKWVKVSTQDQQEIYNFKRGSFPGVMPMIQRTSEPLNCDYSIYIHNVTREHTGTYHCVRFDGLSEHSEMKSDEGTSVLVKGAGDPEPDLWIIQPQELVLGTTGDTVFLNCTVLGDGPPGPIRWFQGAGLSREAIYNFGGISHPKETAVQASNNDFSILLQNVSSEDAGTYYCVKFQRKPNRQYLSGQGTSLKVKAKSTSSKEAEFTSEPATEMSPTGLLVVFAPVVLGLKAITLAALLLALATSRRSPGQEDVKTTGPAGAMNTLAWSKGQE

SEQ ID NO: 672 - DNA, 2718 bp, Homo Sapiens
ggaacacaatgacttggatcaaacagcctaaatgggaagaaggacatttttgctgcatcaaggaagccgttaaactcctgctaagctaactagctcttttttatgggtccatgcacacgaccgaactcctctttcactgaccagagattatttctgacaacccaggatatcccgaaagcttggaggcatatggctggaaaatgaaacgacccaggacatcgtttctggctgcatcattattttgtgtcgcgtagtaccagatgggcagtcagtgagcggcgcagggatgtgaacggacggttttataatgtgaaaattttcccttggtaaagctaaaacagatttaatttccctctcttttctttcactacttccccctctttattccccctctgtctgcaatatcagtgaactcaactttgcagtgaggtggccaaaaagagagagaatgaggagatcttgatcatcttagtgtcggaggagtcgcagcggactgggaactgcagctgcgaccccccgcgtcctgtgcggatttcagggctgataccgcataggcggttatggaaaggacggtacaccggagcggcggaggatagagaccctggcccccggagaggtctgctgatttcgcagcagccttcgaagccgtggctgcctttcatctgctgcgttttattactattatcgccgttccggaaaagtcatggaagacagcccgctgccagacctcagagacatcgagctgaagctggggcgcaaagtacccgagagtctagtgcgctctctccgtggggaggagccggttcccagggaaagggacagggacccctgcggggggagcggtggtggtggcggcggcggcggcggctgcagtagcagcagcagctactgcagcttccctccctccttgtcgtcctcctcttcgtcctccccaacctctggctccccacgaggtagccactctagcgccctggagaggctagaaaccaagcttcacctcctcaggcaagagatggttaacctcagagccacagacgtcaggctcatgcgccagttgcttgtaatcaatgagagcatcgagtccatcaagtggatgatcgaagaaaaagccaccattaccagcagaggcagcagcctcagtggcagcctgtgcagtttgttggagagtcagagcacctccttacgtggcagctacaacagcctacacgatggcagtgatgggctggatggcatttccgtgggaagttatctggacacgttggcggatgatgtcccaggccatcagaccccttcagacttggaccaattcagtgacagctccctcatagaggactcacaggcactacacaagcgtcctaaattggattctgaatactactgctttggctagtgacagttttttgcatgggactggtgtgcaatgaacttgtatttatccttcttctccgctgctatatttttggtgtgatttttattttaataagatgacctttttaaaagaagctgattttgaaactgcttaatggtattgctgttgctcctaatacttctcatctgagctgatttatttttctctgttacatctctattttttatttattacaatgattttctcccttcttttacagtagcacaaacaaagtagggggaaaagaataagcaataattatgtttttgcttttgttttcagagcaatgggtcagggattacaagaaaaactttgctaaattttacaataaaccaaagtctgataacagttaatgttgctgcttgcgtccttaaatgacttaaggtttcatcttccagaagatattgagatatattactgtttgcatatcaggttgaacaaaatgcttggaacaaaattaagcattatttctagaccacaacattctagtgtataatcaaccatactgttagtcacacacgcccacatgacaatcatctgaaagtccccaactatacacattctgttcaaccaactcacccttgtgttggtactttagattaacattttgtcatcagtgattctaactcaaatcatatgtttatttgtgtaataaaatgtattattctcccaaatttcaaggaataattgagattaagtatggaggccattcaaggcaaaaatgtcctaaatttaattgcattttgagattttgttggcatttacttgtatgtattttgtgattctgataggatgtataaatacttagatgcatacaagccgatggatagaaagacagataaatatcccgatagcctactatcagcatcctactactgcttccctaaagcagaattgttattcatttaagaagtctaatatgatatacattcatcctagtataaataaataatctctaagttttctgaaatggaatatttaacgcacatagacagtggatatttactttaaatataatgttattaatcctctgcatttcttttatcttgataactcctagtgagggaatctaattaagatttcatgctgttctttgtaatgataaatgtttccggactaaacactctataatacaaatcaaaaaatcttccttcttataactgagaaatgtttcacccaaatttcctttgttattatatatttactacacatgttgaatttattattgtttatttccaaggcatgtattattcaatttctaattaaaatatatcagggcttaaaaaaaaaaaaaaaaaaaaaaaaaaaaa

SEQ ID NO: 673 - protein, 228 aa, Homo Sapiens
MEDSPLPDLRDIELKLGRKVPESLVRSLRGEEPVPRERDRDPCGGSGGGGGGGGGCSSSSSYCSFPPSLSSSSSSSPTSGSPRGSHSSALERLETKLHLLRQEMVNLRATDVRLMRQLLVINESIESIKWMIEEKATITSRGSSLSGSLCSLLESQSTSLRGSYNSLHDGSDGLDGISVGSYLDTLADDVPGHQTPSDLDQFSDSSLIEDSQALHKRPKLDSEYYCFG

SEQ ID NO: 674 - DNA, 4318 bp, Homo Sapiens
ttctgctgccgctaggggtagcggcggcggcggcggctgcggctcgggagcgcggctgctttgagggctcgggaaccttacagagtggggacgtggggaggctagagggtgagaaagctggcgggagagtagggcggcgctggaggagggcggtgcgtggctgactcatcctctggaagatcagactgacagagacacacactagcccgccccgcccgcccgcgccgctcctcctcagccgggaggcgcccgcccgcaccgaccgcccgccctctccgggcgctgtccgggcccggccgtctcagagaaagtttttcccatcggaggggcgggagccgccgcgggccttttggaaaggaagtggggacggaacaggaggcgagagccgcgcgggcccgcggagtgcatggtgcccggcgcctcggctgcctggcaggaggacctcggggcggggtcgagctgagcccagctccttctcgcctcagccgcgccagaaaccgccttgccggacggccgcgggggtcccagctcctcagctcgccatgtcccggctgctgccgctgctgaggagccggaccgcgcgcagcctgaggccgggcccggccgccgccgccgcgccccgcccgccgtcctggtgctgctgcgggcgggggctgctggcgctcgcgccccccggcggcttgccgggcggccccaggcggctgggcacgcaccccaagaaggagcccatggaggcgctgaacacggcgcagggcgcgcgcgacttcatctacagcctgcactccacggagaggagctgcctgctcaaagagctgcaccgcttcgagtctattgccattgcccaagaaaaattggaagctccaccacccaccccaggacagctgagatatgtattcatccacaatgcgatacctttcatagggtttggctttttggataatgcaattatgattgttgctggaacccatattgaaatgtctattggaattattttgggaatttcaactatggcagctgctgctttgggaaatcttgtgtcagatctagctggacttggacttgcaggctacgttgaagcattggcttccaggttaggcctgtcaattcctgatctcacaccaaagcaagttgacatgtggcaaacacgtcttagtacacatttgggcaaagctgttggggtgactattggctgcattctaggaatgtttcctttaattttctttggaggaggtgaagaagatgaaaaactggaaacgaaaagttaatcctcttagaatacctataaaaagatgtaaactaatgtacctcagtaattaaatatgctgtcacaacatttaggaattaagacagtaacagtatagatatgggatcaaataatttagcatgtattatggaaaacactaacttattgtggcttgatcttcttaggacatcttttttaaaaagctgtttagtatcattttgtgtatattgttgaaatgctttttcatcaatagcagtcaacattttatcctttctttttatattcataatgttatttaagtgtcattgatgtactgtattgacttggggtttgcttatttgttacttaacatgtgtacatgcatgaaagcatttttcgttgttccctgatagttacatttcaaccttgggatttttccaaattacttaagatgtttaatgtcagttaaagatttttttaccctctttttgggaacatcaattttgtactgttatgcagtaaacatttataataatataatttcagtcatttcttaactgtcacatctattgaaaatggatatagatacaggttttaagtattttaagtatatattacttattttaattttctgactttactattttaagggccagagggttaatcacaaagagcaattatgtggtctccctgctacatgaaaccgtgtatactaacaagcgtacaatttttagttgattttttttaaccttttagtttcccagttttgaataattacatggtggattctgacttttgaggggaagcaaatgattattttagagtctttgaaatggggattgtggaattagattgaactaagggatttaacatgatgcttggaaattaagagactaaagctttttttaaaaaaaggtggaaaataggaactgtcaagaaggtttatggtataaatgatgaagttgaagtgatgtttgaaagattaatgagatacaatttatattatttggtaaggtttttttttttccctccaaagatgtcatcttctcatctgaatggaataagtctgaataccccatattcatactcctaatctcattatatcttatttagtgaattttatttatgaataatttctgttgaagtgaaaactagatatttaatattttgcttttttgctacatagtctactcaaaaattacatgaggagaaatcctttttccctttgtttttcttttttcttcttttgtggtatttaaagcatattttaggttgaagttacttatttctagtcttgtacttctggcttaagtataaccatgtaagaattataaattttagttttctgaacccttaaacttttttagcatgtggtctgttacacatgctaaaaaattagtcttacttgtaacagcgtaattaaacacatcatggaggagagaaacttaaaattaaaatagtattttggcttttgaagttatttgtgttgctaaatagatgcagaggttttacagcagtttattttaaggttttatttatacataattactttgaactcttcagagtagatattttttcacaaggcagtttgtcataaattctctcatgcgcttcagaatgcataagtgccatcctttaatcatagactttgaggagagaaagcataaaaatatagcatataatctaaaaataaatatataacatgcacaaataatgtgacattcttactgaatcaaatcatgattctagaacttgagatcttaaatagaatttcggtttgtatcttccatataataaccacacacagataaccacacaaaaaatcctttgtaaaatttctgattgataggattagagtgcttaaatttttggggggggaagggtggggtaaagtgtaagtgctttcttttgtccctaacttgtgtattgatggcagtccactctgttttctaaaaatgtattttactgtggtgcttaacttcttattaattaaatcccgtatcagaaaccttgcctgtgactttagaaagggcttttgattattgttttttcttcttgctcttgaaagtaatctggtcccagggaattactggtttaactgaacatctccagaattatttaaggtgtcaaaatatataaccttcacattgaaagataattttaatttatgggcataataaaaatttgaatcattcaggtaattttcaaaaaatggagaccatttgtctttaactgaaggtatatgtttaagatcatagtctaccctagtatggtgctttgccacaaagtgatttctgaagaatggttctttttaagataatgacttcatatgatcattgtttcatgttacttgccacaaataactttaatttaggttgaaactggaactgtttgtttctcatattagctacttctctattaggagcacaagaaccatagttaaatgcaacatgagctactttagtcctgtttgtttaaatttgtgttgtccatgtattatgatttattaacttgttgatgcatgtaaattgggtgcattttgttgccatgtatgttaaatggtgaccaatgtttttacaaaggaattgaacaaaaaaagtatcttttaagaaatttggaatgtggttttgattttgaaatttgatttcttactaatctcagagggccttggtatattctgttactaaagcaaacaggattaatgaatacggatttgttacaaggtggcagcaatgtcactgagatagtgaatggaacaatttaccacctccctggaatctgcacctgagatacaacatcagcgtatgagtgaagagtgagcccatagaaaagctttagatagactcacataagtcacactgatgggtatttacagcagatatatccaagctgtttatgtaatagtctcatttactttattctttttctctagaacataaattttgaaggtaatggaagtttatcttttataccaaaagtttgtatgagccattttgaagtaaatctttctaattttagaattatattttctcgccatcttaagacagtatattaaatataatataacctttttcttagtggctaaaaaaaaaaaaa

SEQ ID NO: 675 - protein, 240 aa, Homo Sapiens
MSRLLPLLRSRTARSLRPGPAAAAAPRPPSWCCCGRGLLALAPPGGLPGGPRRLGTHPKKEPMEALNTAQGARDFIYSLHSTERSCLLKELHRFESIAIAQEKLEAPPPTPGQLRYVFIHNAIPFIGFGFLDNAIMIVAGTHIEMSIGIILGISTMAAAALGNLVSDLAGLGLAGYVEALASRLGLSIPDLTPKQVDMWQTRLSTHLGKAVGVTIGCILGMFPLIFFGGGEEDEKLETKS

SEQ ID NO: 676 - DNA, 3981 bp, Homo Sapiens
cgggctgagagggacctggggagctgcggcctggccggggcggcgcactcaggtggcctcgcttccctgcgggtcaccgcccgccactcgcacagctaggtcggcctgttgggatcgggagaggtgggcgcacgagttttagtgcgggagtccggggtgcgggcggagtcctattgtccccgtgcacccgggcggcagcacctccgggtccctctttaaaccgagcgtccggcgacctttctttgtgcttagggagtcgaaagcggcatcttctccgagagaagtcgcctactggggggtggcgctggggaggtaacaatgggcgcccattgtcctccgagggtccaacggtgacccccccccgcgcgcgcgcccggccaccggttggccccgggccagggcacaggtaccgcggctgggagggtcggccccgctgcccgcgccctccgccccgccccagtgagtccccgcgccgccggccccgccccgcgccgccccgccctccgcaggttcagtcctcgcgtccggccgccccgcgctcagtcgcgcgcaccttctctcgcggccgggggaccgcagcgcggggctagcccggagacccggccaccggcctggggcgccttcacgccgtctcggagcggataatgcggtgagcaggcaccacgccggcagactcggctggatctgcgcacagcggcagggattgcgtgcgcccgcgggaggcccggggcagcggctgggatcctcagcggcggccggtttgtcctggttgtggtcaagactggatgatgtaactggctctctaggaagcctcacttggccgtaacctcaggaaggttctctttgaccccatctcatttcgaagccacttctgaagccacttgagaaaaatgatgtgacagttcctatcaaaaaggattcagaaacatataccatctgtgaagaaagtggccctttctcccgcttgcaaaatagacattctcaaattccaaaatgccagccaagaccccaatttacctgaaagcagccaataacaagaaaggaaagaaatttaaactgagggacattctgtctcctgatatgatcagtcccccgcttggagactttcgccacaccatccacattggcaaagagggccagcacgatgtctttggagatatttcctttcttcaagggaactacgagcttttacctggaaaccaggagaaagcacacctgggccagttccctgggcataatgagttcttccgggccaacagcacctcggactctgtgttcacagaaacgccctccccggtgctcaaaaatgccatctccctcccgaccattggaggatcccaagctctcatgttgcccttattgtcaccagtgacatttaattccaaacaggagtccttcgggccagcaaagctgcccaggcttagctgcgagcccgtcatggaggaaaaagctcaggagaaaagcagtctgttggagaatgggacagtccaccagggagacacctcgtggggctccagcggttctgcatctcagtccagccaaggcagagacagccactcctccagcctgtccgaacagtaccccgactggccagccgaggacatgtttgaccatcccaccccatgcgagctcatcaagggaaagactaagtcagaggagtccctctctgaccttacaggttccctcctctccctgcagcttgatcttgggccctcacttttggatgaggtgctgaatgtaatggataaaaataagtaacaagatgccaacttttttcctttggggtaaaaggtacaaaaacaaactaaccacagttgaagagaagggcttccggagctgtatttgcagttttgtgttgggttttctaaaataatattcttacaaagtatttttttacctgttatgccctgtttgcaaaaacaatttagaaaaaaacaacaaagcaaaacctatcttggcaaaaaaaggaagtgagtcagagcccattttcaggaggcattggtgatgttcggctcacatattgtttgcagacacacaagaaatctggcttggccaggattggcactagctatgaagggctgagcgagtcacattaaggaacttcacggaactttatagcactccgacattttctgagcaagaggaagtcaaaatttatttaacacctaagcctttttgtagactcttttctatatattgcttaggctcaccatagcgaattctccagtgttaaaacttttctgttttcacatttgaactttatgggttttggggattttcttgtagttcttatatatccctatatattatatctatattgcaaaattttgactgtcagctacatgttggtaagacacaggcaaagtattactgtaactaagttatttttaaagttaaaatatatttttacgtgcctttggctttttattgcagagtctacattttatagattctacatcagatgttgtcacttatttccattgggattccattgtaagctgtgtatgtgcgtgtttggaaaagtgtattcatacttagtttttttttcttcatctgttatcatacttttaacagcaaccaataacggattgtaaagtgtaaaggcacaggttactcatgatgcttctgcagagactgtgggctacaccacatatgttatttggaaatataggtattttagtacagtacatacttgcattacataggtacttcaagcaacacaataaaaagtaaatgataaagtgaacttgcttgtttatagtaataaacaagaccataagagaataagtatagctagagaaattgcttctctgaaatgtacatgagcccttaaggtaagagatgatttccatctactctcattttgattacttccttatggtttgagaggctagaaactgagcctctctacttttggaaaaatgaacatgtgaggtcagatttttttttttttttttaagtcagcactgatgccaccctctcagtggtcatttctgagcatcttcctgacttgaacaccttctacagcaaactcttgcaagtccagtttcatccctgtaaggcaaatgtcttttcacgcagaaagtgccatatagacgagataaaggcagctaaaacgagggcagtagagagcacttacccgaccccaaggtgccagagatgccctgaggatggtggttaaggaaacaggagcaggaaatgtacacacagattcctgtccctttgccaactactccttccccatcaaagaaaaacacttgcacacagtaactaccagctccttctctcaaacttgtatttctcctggaaatgtatctcagaaatgacctcctctcccaaccacttcaacgattctttctttgggtttggggttcttgcagttctatcatctaaaataacctttggactgcaggtaaaatgcaattaggacaactaaccaagtagacgaaacaagttcccctaggcaggggtgtccaatattttagcttccctggaccgcattggaagaattttcttgggccacatgtaaaacacactaacactaaccatagttgatgagcttaaaaaaataaaaatagaaaattgcaaaaaaaaaaaaaaaaaaaaatctcagactgttttaagaaagtttaaaaatttgtgttggacttcatgcgggccacaggttggacaagcttgccctagggcattgtgtgctttccgtaacttctcagttgtatttcgttatccatgactctccagtgttttttctgttggaccacacccgtcacagttcacagttccaaagagaaatttcccagcctattctaaatcttgttaatgacgaagagtccaatgtatctcattatttgtagccaattttagactcttttcaatacctcccccccattttaattagtattgatcatattcagtctttcattttactcttcatctgtagcgtgacctcaaggtaaagatgaaactatttcatgaaaaggg

SEQ ID NO: 677 - DNA, 155 bp, Homo Sapiens
  misc_feature (9)..(10): n is a, c, g, or t
  misc_feature (39)..(39): n is a, c, g, or t
  misc_feature (42)..(42): n is a, c, g, or t
  misc_feature (49)..(49): n is a, c, g, or t
  misc_feature (52)..(52): n is a, c, g, or t
  misc_feature (64)..(64): n is a, c, g, or t
  misc_feature (76)..(76): n is a, c, g, or t
  misc_feature (93)..(93): n is a, c, g, or t
  misc_feature (149)..(149): n is a, c, g, or t
  misc_feature (154)..(154): n is a, c, g, or t
maktykaannkkgkkkrdsdmsgdrhthgkghdvgdsgnygnkahgghnranstsdsvttsvknastggsamsvtnsksgakrscvmkakssngtvhgdtswgssgsasssgrdshssssydwadmdhtckgktksssdtgssdgsdvnvmdknk

SEQ ID NO: 678 - DNA, 6917 bp, Homo Sapiens
cttttcctttttgatccattcaaaaattactcattgcaaattcccggactgctaggcgaggagagggaagggggcggaggagacagggctactgcaggcgcagagctgggggcagccgggggcccgagtggctgaggctggtcccgcagcggccgcttgccggcgttctggctcctgtggcctcaccaggaagcgtcagagtcccgacactggggaagctcggagcgccgcctccgctgccgccgcctcctgcctggctctgggtccccgagccccctcccctggcccagcccgactccctcctccttcccgaaccatccggctcgggctccttccctggcgatggctggccgctgagccatggctcagtacggccaccccagtccgctcggcatggctgcgagagaggagctgtacagcaaagtcaccccccggaggaaccgccaacagcgccccggcaccatcaagcatggatcggcgctggacgtgctcctctccatggggttccccagagcccgcgcacaaaaagccttggcatccacgggaggaagaagtgttcaggcagcatgtgactggttattctcccatgtcggtgaccccttcctggatgaccccctgccccgggagtacgtcctctacctccgtcccaccggccccttagcacagaagctttccgacttttggcagcagtcgaagcagatctgcgggaagaacaaggcacacaacatcttcccccacatcacactctgccagttctttatgtgcgaggacagcaaggtggatgccctgggggaagccctgcagaccacggtcagtcgctggaaatgtaagttctcggccccgctgcccctggagctctatacgtcgtccaacttcatcggcctctttgtaaaggaagacagtgcggaggtcctcaagaagtttgctgctgactttgctgcagaggctgcatccaaaaccgaagtgcatgtggaacctcataagaagcagctacatgtgaccctggcttaccacttccaagccagccacctacccaccctagagaaactggcccagaacattgacgtcaagctagggtgtgactgggtggctaccatattttctcgggatatccgatttgctaaccatgagacattacaggtcatctacccctataccccacaaaatgacgatgagctggagctggtccccggggacttcatcttcatgtctccaatggagcagaccagcaccagcgagggttggatctatggcacgtccttaaccaccggctgctctggactcctgcctgagaattacattaccaaggctgatgaatgcagcacctggatatttcatggttcttattcaatcttaaatacatcgtcatccaactctctcacgtttggggatggagtattggagaggcggccttatgaggaccaggggctcggggagacgactcctcttactatcatctgccagcccatgcagccgctgagggtcaacagccagcccggcccccagaagcgatgcctttttgtgtgtcggcatggtgagaggatggatgttgtgtttgggaagtactggctgtcccagtgcttcgatgccaaaggccgctacatacgcaccaacctgaacatgcctcatagtttacctcagcggagtggtggtttccgagattacgagaaagatgctcccatcactgtgtttggatgcatgcaagcaagactagtgggtgaagccttattagagagcaataccattatcgatcatgtctattgctccccgtcccttcgctgcgttcagactgcacacaatatcttgaaaggtttacaacaagaaaatcacttgaagatccgtgtagagcccggcttatttgagtggacaaaatgggttgctgggagcacattacctgcatggatacctccatcagagttagctgcagccaacctgagtgttgatacaacctacagacctcacattccaatcagcaaattagttgtttcagaatcctatgatacttatatcagtagaagtttccaagtaacaaaagaaataataagtgaatgtaaaagtaaaggaaataacatcctgattgtggcccacgcatcttcccttgaagcgtgtacctgccaacttcagggcctgtcacctcagaactccaaggacttcgtacaaatggtccgaaagatcccatatctgggattttgttcctgtgaagaattaggagaaactggaatatggcagctgacagatccaccaatccttcctcttacccatggaccaactgggggcttcaactggagagagaccttgcttcaagaataaaccacaccagtgaacaagaaggaaaggccttttggagtgtgtctttctgtgtgtttaaaaacagtgggaaaatccacaccacactctaagtggacagctcagaataatttagcatatttcctttcacacttaaagttcttaagatgagactgtgtaaatgagagaaagacttgattcagaggaaaaaaatgtgttctctctggactcttgcctagctcacaaggctttggagaattgtcttcctaaatcggggcacctgctacagaagagaatgtttcgttccctctgggtatgcacagctaaggggcctcatttctcccagagggagctgctggcccgctctaaggggtgcaagaggaaggagtgtgcccagaccagctgggggagcattgaaaggacagcttggggatggaatttttttttttttatctccattttccagttaggtagagccaagctgaggaatccttttaagattattagaaaacatgccctgaagagagttgttcttaggttacacatgaaatcctaccgtcactagcccccatacaccagtgttgctggctgaagatacccgcttaaggatgctaacatttaccctggtactgccacattttctctagagcagctggcccttcttgctacagccctatcccccctccttgcttctgtgaaatggggagacaaagcacttttgctctccaaagcacttttggatactcaggaggaaagataagatacatgtttgaagtattcaatcataggagcaaagaacttgcaaaatatgaagtgacttggaattaaccatgttgtagcctaacgtgctactgcatttctaaatcatcaatatttgcttgtctttgcccctagactctagactatgttaactagttaaggatgttacattttgaaaggatgtatgttagatatattatttgcagcaagaagttcattctgtgcaatatggacatgtttgcaaaccataccaagggtcaggttgttgtacacttacagtacgtgtcaaccataatggaacatccacaaatgcatcaattataccagggatgtatagtaagtcagggaactaatataaatgatgacagtcatggctgcactgctacttgtgctgtcgttttgtttgtttttctatgataatttaaaatacataggtagggctactgaggaaatttggagagccacattctgtggtttctcattatacttacttcctgcatttagagggagtttatttaaaagaaataaatgacaatcaaaccaaatcatcagttatcaatgtctgtttaattgtgtgactatctgactgttgatggccacagatgatggtctcctatggtatagttcactctgtagaagatgtatgcaaagtgaaatgccagccctttaaagagacattagttagtgtaaaatggatctttacatgttgcagtaacattgactatgtttcaaaactcagatgcataaaacgtaaggtatataaaaatacatctatgcttgcgtttgaaactacaacttgataacccctagaaagaagaggacatgaaaggatgctggctatatatgttaatgagcaaaaggattatagttgttttgttttgtttttagagacagggtctcactataatgcttagactggtcttgaactcctgggctcaagcgatcctcctgcccctgtctcccaaagtgctaggattacaggtgtgagccaccacacctggcccatagttgtattttttttaggtcacttagaaaaatatgtcatgtattttacattttgagaaacaaatcaatcatggtttcttctagcgttgcgcaaacactgacccagcttctgggtatggaaataaccctgtgatgatgtgttaatataaaatgttgggagggaatattcccaataaaggtcttaagagaaaagtcacattacaagtaatgtaatggctctaccattcattcttctggtatttgtaatgaagtgaatccactgtttaatcagatccataatctttaacagattcaccacaaattttcatgggcgttgagtgctcagaataatgcttgaacacctcaccttgaaactgtagcagtgtgttctgggcagtatctgtaatgtatgaaatagagtctggaataggttatccactccatcttctaggttatcttagttgtatgacgaactgataaatctgtctgactgggctacaatccattgttcttagtccaatatggacactgccttaggcaatggtctatataagcaaaaggagatagagatctgaaataattttccgaataattcaggtggaaaacaagaaagattgtatttctctgctttcatttcaatttcattatttcaaattgcttgtcaaaatggcccaaaagatctgaattcacattaagttccccttgcacacttacctatttaaaaaactaaacttgcactgcaactgagaaattatttgtaaatcatgtggcatctatgtataataaaagaaagagacaactatattactcaatttcatatacatccaaaaagtataggctaatatatataacctgaagttgcagctggttctttttgatctgaagctgatgcttattaaaacaaatgatgtatggggagaggagaaggaagggcaaggaaggaattgacagataagaagcaaatggtttcttgtacagaggaattttgttttaatgtagaaagttatttgaaataaactaggtgaaatgaaattaactaaaggttttaatctgggattgaaagcctgaaagcatttcctgcttctacaagtgtgccacatcaatccggtaatgccccagtgttattcacagacagaactttgtttcctgtgattttaaaataccgcgtctgttcctccatggaccagagtaattggcacattttaatgcataagctgggggtttcattttcccaggctctcttcaccatcactgcattggtagctaggagcttattgcttcaccccagtatggagttcagattacagtgttttccattacatttagattcatagaatctgaatggctgattaaatggccatctgatggctgaaagaggggcgtatttttcactctgtagtgaaaggcttggaggagtttctactttttattttaattatactttaaccaaagaattattttaaagtaaccttatatttaaaagatgattttgcaaaaaataaaaaataaaaaatatgccttctggagtgatgtctgtttggtaaatcattgttgataatttccttgttagtggtatttggaatgcatatagattgtcttgtcattgtgcttaacattaccataagtgtgtcttttccactcaactagctgtattcgtattaaaatgaagtctcttatttcaattacctagtgttgttgggaactaattgaacagctacagtaaaagaagttcctatctcattgcctttgtggaaaggcttccctatgtggtaaaagaaaggcattcctccgtaacctaggcactctgcaagtccagtgtttaatttcaaagcagtgatgaattgctcttttgaaattactctaagtaatccatgtgttagaatacagatgaacctccgtttgatttcacagccttcagcacaggcaactgttactgagtctgcacgaacttagataatgaggtgcagggttatttgcatttaaattgcaatccagcacacgtgtgagaaagaagaggcactagtctaaaaggctgcattgcggggagagatgagacaggcagaggagggtggggtaaagagcgatttaacatctatttaggttaatgttcactttacaaaggtgatgggggatattttgttaggtgatagcagaagcttttcatttttaaacatagaattaaaattggatttgcttctctttaatacttcaacatattgaatttccctaggaaagtgactagctataatgaaaattcaagcgaaaagggaaaaagattgtaaatgcagatgaaataacttcatttttaagtacaaataatagtaggattggtgtatgtaggtttaaaattatagtgatgactagtcgaacttaatatacaatcagttcttgcaaatactttacacttagctgccattacacaacaaattggaattttccagctgttcaactatcatggactctgtacaggatagatgtgtataatggaaaatatgtactgcttctttctttgattgccactcaagatggaaacaccatgccaaggcattttggttatacacagatcattctaaacctgttattttggagaggtgtattggtttctttctcatttataaggctattgtatttttttttgtatgtgattcaggtgtatttatttgaagactatttgtagttataggaaaaccacacctacctgtattgccaaattctttgtaaactctccgtggcacttgtgctttcctggctgagagctctcccctgttgatacagctatggcaccattgtaattacagatgcacctttcaggagcatctccattaaatggttcatagatgatttaataaaaagaaacttctcagttgatccagaaaaaaaaaaaaaaa

SEQ ID NO: 679 - protein, 649 aa, Homo Sapiens
MAQYGHPSPLGMAAREELYSKVTPRRNRQQRPGTIKHGSALDVLLSMGFPRARAQKALASTGGRSVQAACDWLFSHVGDPFLDDPLPREYVLYLRPTGPLAQKLSDFWQQSKQICGKNKAHNIFPHITLCQFFMCEDSKVDALGEALQTTVSRWKCKFSAPLPLELYTSSNFIGLFVKEDSAEVLKKFAADFAAEAASKTEVHVEPHKKQLHVTLAYHFQASHLPTLEKLAQNIDVKLGCDWVATIFSRDIRFANHETLQVIYPYTPQNDDELELVPGDFIFMSPMEQTSTSEGWIYGTSLTTGCSGLLPENYITKADECSTWIFHGSYSILNTSSSNSLTFGDGVLERRPYEDQGLGETTPLTIICQPMQPLRVNSQPGPQKRCLFVCRHGERMDVVFGKYWLSQCFDAKGRYIRTNLNMPHSLPQRSGGFRDYEKDAPITVFGCMQARLVGEALLESNTIIDHVYCSPSLRCVQTAHNILKGLQQENHLKIRVEPGLFEWTKWVAGSTLPAWIPPSELAAANLSVDTTYRPHIPISKLVVSESYDTYISRSFQVTKEIISECKSKGNNILIVAHASSLEACTCQLQGLSPQNSKDFVQMVRKIPYLGFCSCEELGETGIWQLTDPPILPLTHGPTGGFNWRETLLQE

SEQ ID NO: 680 - DNA, 3276 bp, Homo Sapiens
aagtggcccggccagcggcgcggcgtccggggaggaaatggatgctgtgctggcctgccggctccgggggcggggaaatcgagtagctgcactcaggccccgcccgagacccggagggagcgccgggccgtccccttttgccctcctttgcgctgggctgagcccagagccgagagcaggagtcggctctgagttccctgcttggtttttgggtggcagcagccagaggaggaatatggcgctcttaggcagccgagcggagctggaagcggacgaggacgttttcgaagatgccttggaaaccatctcaatatcttctcactcagatatggcaacaagcagccttcactttgcatcatgtgatacacaacaggcgcccagacagcgcggagcgtctactgtcagcagttcatcatcaaccaaggtggatctcaagagtggcctcgaagaatgtgctgtggcattgaacttatttctaagcaacaaatttacagacgccttagaattgcttcgcccctgggctaaggagagtatgtaccatgccttgggctacagtaccattgtggtgttgcaggctgtcctgaccttcgagcaacaggacatccagaacggcatttctgccatgaaggacgctttacaaacctgccaaaaatacaggaaaaaatacacagttgtagaatctttctcaagtcttctttctagaggatccctggagcaactgagtgaagaggaaatgcatgctgaaatctgttatgccgagtgtctcctacagaaagctgcactcacgtttgtgcaggatgaaaatatgatcaacttcatcaaaggtggactcaaaattagaacaagttaccaaatatataaagaatgtctttctatcctgcatgaaattcagaagaacaaacttcagcaggaattcttctatgagtttgaagggggtgtcaagcttggcagtggggcctttaatttgatgctgtcccttttaccagcaaggattatcagactactagaatttattggattttctgggaatagggagttgggcctcctgcagttacgtgaaggtgcttcaggaaggagcatgaggtctgcactgtgctgcttaaccatcttagcttttcatacttacatctccctaatacttggtacaggagaagtgaatgttgcggaagcagagcgtctcctggcacccttcctccagcagtttccaaatggctcactcgtgttgttttatcatgcccgaatagagttgctgaaagggaatcttgaagaggcacaagaagtatttcaaaaatgcatttcagttcaagaagaatggaaacagtttcaccatctctgctactgggagctaatgtggattaatgttttccaacaaaactggatgcaggcatattactattcagatctgctttgcaaagagagtaaatggtccaaggcaacttatgtgttcttgaaagcagcaattttgagtatgcttccagaggaggatgtagtagcaacgaatgagaatgtggtaactttattcagacaggtggacagcttgaagcagagaattgccgggaaatctatccctactgagaagtttgctgtgaggaaggctcggcgttactccgcctccttacctgcacctgtgaagctcatcttacctgccctggaaatgatgtatgtctggaatggtttttcaatagtgagcaaaagaaaagacctttctgaaaatctgttagtaactgttgaaaaagctgaggcagctttacaaagtcaaaattttaacagcttctctgtggatgatgagtgcttagtgaagttacttaaaggatgttgcctcaagaacttacagcggcccttgcaagctgaactatgttacaatcatgttgtggaaagtgaaaagctactgaagtatgaccactacctagtgccgttcactctatttgaattggcatctttgtataaaagccagggggaaattgacaaggccataaagttcctagaaactgcaaggaacaactacaaagattactccctggagtccagactacacttcagaattcaggcagctcttcacctctggagaaaaccttcctcagattgatcagaacttgaaggatggaatttttcctcaattagcatcggcatctgctatagattcaaccttatattaaagtggaaaaatgatcttgtgaataagagacaaaaaaacagtttttttggtcaatattttctatcatctgagagatttactgttggtctacataattttttttcctatggaatggcattctatattatctagaaaattcttatattttgcctcccccaaaagaatttcatattatttgaattagggggcgaagaagtcttttgaaagacttgcagatgcaatagtctaattagattatttatttttttaatgtgaaaattaatattgtttagcaaatagcttacaagttgagccaattttggatttgttgggtagttaaacttcagagatattttgttgcctgtatttaaatttcagaagataaataaatatcattgcatttaaaatagcttaacagtgaccttcagaagacttctgaaaaagacagtctgagaacatgaacacggatcgatataatgtacttcatgggttgaagagacctttctctataaaggatgatgcagtattcagttagtggttttttactcttcatttgattaaaggtggtgacgttttggagagactgattttgaatgtacttaagtctattataataacaaaattcaaaacccctgtgtatctaaagggaaggaagtgtcatattttaggaatttttcttaaccttagcaatgagagcctaaaatacatacatggattatttttcttctaggaagtaaatttcctgctgctttaaatgatatgtaaaatatcaataatttttacacttaagatgttggtaagacctagttttctaatctctctagcactgtgatgtctccttgtagataatctggaccttgcttagtcctttagttgggaaacagaatcagggcatagagcagaagagagcttgacactccatatggtcctggttctgctacccattagcgattagtgaggagacctttagggagtccactgtgccctgtgtgtcaccacattttcttctgtgaaatcaagattaaagaacagatgactttcaaggtctttttcagttttataactgtgagtctatgtattaggtatttattttcaacaaatgactttaaaatgtcgaatgcaaaccaaaaaaaaaaaaaaaa

SEQ ID NO: 681 - protein, 682 aa, Homo Sapiens
MDAVLACRLRGRGNRVAALRPRPRPGGSAGPSPFALLCAGLSPEPRAGVGSEFPAWFLGGSSQRRNMALLGSRAELEADEDVFEDALETISISSHSDMATSSLHFASCDTQQAPRQRGASTVSSSSSTKVDLKSGLEECAVALNLFLSNKFTDALELLRPWAKESMYHALGYSTIVVLQAVLTFEQQDIQNGISAMKDALQTCQKYRKKYTVVESFSSLLSRGSLEQLSEEEMHAEICYAECLLQKAALTFVQDENMINFIKGGLKIRTSYQIYKECLSILHEIQKNKLQQEFFYEFEGGVKLGSGAFNLMLSLLPARIIRLLEFIGFSGNRELGLLQLREGASGRSMRSALCCLTILAFHTYISLILGTGEVNVAEAERLLAPFLQQFPNGSLVLFYHARIELLKGNLEEAQEVFQKCISVQEEWKQFHHLCYWELMWINVFQQNWMQAYYYSDLLCKESKWSKATYVFLKAAILSMLPEEDVVATNENVVTLFRQVDSLKQRIAGKSIPTEKFAVRKARRYSASLPAPVKLILPALEMMYVWNGFSIVSKRKDLSENLLVTVEKAEAALQSQNFNSFSVDDECLVKLLKGCCLKNLQRPLQAELCYNHVVESEKLLKYDHYLVPFTLFELASLYKSQGEIDKAIKFLETARNNYKDYSLESRLHFRIQAALHLWRKPSSD

SEQ ID NO: 682 - DNA, 3937 bp, Homo Sapiens
ataagttagcgccgctctccgcctcggcagtgccagccgccagtggtcgcacttggagggtctcgccgccagtggaaggagccaccgcccccgcccgaccatggccgaggagctggtcttagagaggtgtgatctggagctggagaccaatggccgagaccaccacacggccgacctgtgccgggagaagctggtggtgcgacggggccagcccttctggctgaccctgcactttgagggccgcaactacgaggccagtgtagacagtctcaccttcagtgtcgtgaccggcccagcccctagccaggaggccgggaccaaggcccgttttccactaagagatgctgtggaggagggtgactggacagccaccgtggtggaccagcaagactgcaccctctcgctgcagctcaccaccccggccaacgcccccatcggcctgtatcgcctcagcctggaggcctccactggctaccagggatccagctttgtgctgggccacttcattttgctcttcaacgcctggtgcccagcggatgctgtgtacctggactcggaagaggagcggcaggagtatgtcctcacccagcagggctttatctaccagggctcggccaagttcatcaagaacataccttggaattttgggcagtttgaagatgggatcctagacatctgcctgatccttctagatgtcaaccccaagttcctgaagaacgccggccgtgactgctcccgccgcagcagccccgtctacgtgggccgggtggtgagtggcatggtcaactgcaacgatgaccagggtgtgctgctgggacgctgggacaacaactacggggacggcgtcagccccatgtcctggatcggcagcgtggacatcctgcggcgctggaagaaccacggctgccagcgcgtcaagtatggccagtgctgggtcttcgccgccgtggcctgcacagtgctgaggtgcctgggcatccctacccgcgtcgtgaccaactacaactcggcccatgaccagaacagcaaccttctcatcgagtacttccgcaatgagtttggggagatccagggtgacaagagcgagatgatctggaacttccactgctgggtggagtcgtggatgaccaggccggacctgcagccggggtacgagggctggcaggccctggacccaacgccccaggagaagagcgaagggacgtactgctgtggcccagttccagttcgtgccatcaaggagggcgacctgagcaccaagtacgatgcgccctttgtctttgcggaggtcaatgccgacgtggtagactggatccagcaggacgatgggtctgtgcacaaatccatcaaccgttccctgatcgttgggctgaagatcagcactaagagcgtgggccgagacgagcgggaggatatcacccacacctacaaatacccagaggggtcctcagaggagagggaggccttcacaagggcgaaccacctgaacaaactggccgagaaggaggagacagggatggccatgcggatccgtgtgggccagagcatgaacatgggcagtgactttgacgtctttgcccacatcaccaacaacaccgctgaggagtacgtctgccgcctcctgctctgtgcccgcaccgtcagctacaatgggatcttggggcccgagtgtggcaccaagtacctgctcaacctcaacctggagcctttctctgagaagagcgttcctctttgcatcctctatgagaaataccgtgactgccttacggagtccaacctcatcaaggtgcgggccctcctcgtggagccagttatcaacagctacctgctggctgagagggacctctacctggagaatccagaaatcaagatccggatccttggggagcccaagcagaaacgcaagctggtggctgaggtgtccctgcagaacccgctccctgtggccctggaaggctgcaccttcactgtggagggggccggcctgactgaggagcagaagacggtggagatcccagaccccgtggaggcaggggaggaagttaaggtgagaatggacctgctgccgctccacatgggcctccacaagctggtggtgaacttcgagagcgacaagctgaaggctgtgaagggcttccggaatgtcatcattggccccgcctaagggacccctgctcccagcctgctgagagcccccaccttgatcccaatccttatcccaagctagtgagcaaaatatgccccttcttgggccccagaccccagggcagggtgggcagcctatgggggctctcggaaatggaatgtgcccctggcccatctcagcctcctgagcctgtgggtccccactcaccccctttgctgtgaggaatgctctgtgccagaaacagtgggagccctgaccttggctgactggggctggggtgagagaggaaagacctacattccctctcctgcccagatgccctttggaaagccattgaccacccaccatattgtttgatctacttcatagctccttggagcaggcaaaaaagggacagcatgccccttggctggatcagggaatccagctccctagactgcatcccgtacctcttcccatgactgcacccagctccaggggcccttgggacagccagagctgggtggggacagtgataggcccaaggtcccctccacatcccagcagcccaagcttaatagccctccccctcaacctcaccattgtgaagcacctactatgtgctgggtgcctcccacacttgctggggctcacggggcctccaacccatttaatcaccatgggaaactgttgtgggcgctgcttccaggataaggagactgaggcttagagagaggaggcagccccctccacaccagtggcctcgtggttattagcaaggctgggtaatgtgaaggcccaagagcagagtctgggcctctgactctgagtccactgctccatttataaccccagcctgacctgagactgtcggagaggctgtctggggcctttatcaaaaaaagactcagccaagacaaggaggtagagaggggactgggggactgggagtcagagccctggctgggttcaggtcccacgtctggccaggcactgccttctcctctctgggcctttgtttccttgttggtcagaggagtgattgaaccagctcatctccaaggatcctctccactccatgtttgcaatgcttttatatggcccagccttgtaaataaccacaaggtccactccctgctccacgaagccttaagccataggcccaggatatttctgagagtgaaaccatgactgtgaccaccttctgtccccagccctgtcctggttccttcctatgcccaggtaccacccttcagaccccagttctaggggagaagagccctggacacccctgctctacccatgagcctgcccgctgcaatgcctagacttcccaacagccttagctgccagtgctggtcactaaccaacaaggttggcaccccagctaccccttctttgcagggctaaggcccccaaacatagcccctgccccggaggaagcttggggaacccatgagttgtcagctttgactttatctcctgctctttctacatgactgggcctcccttgggctggaagaattggggattctctattggaggtgagatcacagcctccagggccccccaaatcccagggaaggacttggagagaatcatgctgttgcatttagaactttctgctttgcacaggaaagagtcacacaattaatcaacatgtatattttctctatacatagagctctatttctctacggttttataaaagccttgggttccaaccaggcagtagatgtgcttctgaaccgcaaggagcaaacactgaaataaaatagtttatttttcacactcaaaaaaaaaaaaaaaaaa

SEQ ID NO: 683 - protein, 687 aa, Homo Sapiens
MAEELVLERCDLELETNGRDHHTADLCREKLVVRRGQPFWLTLHFEGRNYEASVDSLTFSVVTGPAPSQEAGTKARFPLRDAVEEGDWTATVVDQQDCTLSLQLTTPANAPIGLYRLSLEASTGYQGSSFVLGHFILLFNAWCPADAVYLDSEEERQEYVLTQQGFIYQGSAKFIKNIPWNFGQFEDGILDICLILLDVNPKFLKNAGRDCSRRSSPVYVGRVVSGMVNCNDDQGVLLGRWDNNYGDGVSPMSWIGSVDILRRWKNHGCQRVKYGQCWVFAAVACTVLRCLGIPTRVVTNYNSAHDQNSNLLIEYFRNEFGEIQGDKSEMIWNFHCWVESWMTRPDLQPGYEGWQALDPTPQEKSEGTYCCGPVPVRAIKEGDLSTKYDAPFVFAEVNADVVDWIQQDDGSVHKSINRSLIVGLKISTKSVGRDEREDITHTYKYPEGSSEEREAFTRANHLNKLAEKEETGMAMRIRVGQSMNMGSDFDVFAHITNNTAEEYVCRLLLCARTVSYNGILGPECGTKYLLNLNLEPFSEKSVPLCILYEKYRDCLTESNLIKVRALLVEPVINSYLLAERDLYLENPEIKIRILGEPKQKRKLVAEVSLQNPLPVALEGCTFTVEGAGLTEEQKTVEIPDPVEAGEEVKVRMDLLPLHMGLHKLVVNFESDKLKAVKGFRNVIIGPA

SEQ ID NO: 684 - DNA, 3950 bp, Homo Sapiens
attgcgtcccgctctacctctgtggttctttgggagcgacccccgggaagcgtccaaagtggagttcccacacacgctgcgaacccacagccggttttctctgaactcgcgtccctgagtccgggaggtggaggcggagaaaagggtgcggagcgaccccacgcagggccgccccccctcccaccagcgcgtcctgccgcgccggcagccacaggctggcatagcggctgccgacccgccctcgttcctccaccccctgaacgggactgctgggcccgccccgccccgcctgcaggtgaagcggccgcagccgccgagtaggtgcgtggggatgatctcactcgcgcgctccgcgccaggaggaggaggagcgggagcggatccaacttccgggtagtggagccgcaagccaccggcatcttgctttttcttccccctcctcctgtgtgccccgcgccgctccctctttcccttttattcccggccccacccgccaaaatgaacagctcggacgaagagaagcagctgcagctcattaccagtctgaaggagcaagcaataggcgaatatgaagaccttagagcagagaaccagaaaacaaaggagaagtgtgacaaaattaggcaagaacgagatgaagccgttaaaaaactggaagaatttcagaaaatttctcacatggtcatagaggaagttaatttcatgcagaaccatcttgaaatagagaagacttgtcgagaaagtgctgaagctttggcaacaaagctaaataaagaaaataaaacgttgaaaagaatcagcatgttgtacatggccaagctgggaccagatgtaataactgaagagataaacattgatgatgaagattcgactacagacacagacggtgccgccgagacttgtgtctcagtacagtgtcagaagcaaattaaagaacttcgagatcaaattgtatctgttcaggaggaaaagaagattttagccattgagctggaaaatctcaagagcaaactcgtagaagtaattgaagaagtaaataaagttaaacaagaaaagactgttttaaattcagaagttcttgaacagagaaaagtcttagaaaaatgcaatagagtgtccatgttagctgtagaagagtatgaggagatgcaagtaaacctggagctggagaaggaccttcgaaagaaagcagagtcatttgcacaagagatgttcattgagcaaaacaagctaaagagacaaagccaccttctgctgcagagctccatccctgatcagcagcttttgaaagctttagacgaaaatgcaaaactcacccagcaacttgaagaagagagaattcagcatcaacaaaaggtcaaagaattagaagagcaactagaaaatgaaacactccacaaagaaatacacaacctcaaacagcaactggagcttctagaggaagataaaaaggaattggaattgaaatatcagaattctgaagagaaagccagaaatttaaagcactctgttgatgaactccagaaacgagtgaaccagtctgagaattcagtacctccaccacctcctcctccaccaccacttccccctccacctcccaatcctatccgatccctcatgtccatgatccggaaacgatcccaccccagtggcagtggtgctaagaaagaaaaggcaactcaaccagaaacaactgaagaagtcacagatctaaagaggcaagcagttgaagagatgatggatagaattaaaaagggagttcatcttagacccgttaatcagacagccagaccgaagacaaagccagaatcttcgaaaggctgcgaaagtgcagtggatgaactaaaaggaatactggggacacttaacaaatccactagttcaagaagcttaaaatcccttgaccctgaaaacagtgaaactgagttagaaaggattttgcgtcgcagaaaggtgacagcagaagcagatagcagtagtccaactgggatattagccacctcagagtccaaatccatgccagtgttgggttctgtatccagtgtaacaaaaacagccttgaacaagaaaactctggaggcagaattcaacagcccgtcccccccaacacctgagccaggtgaagggccccgtaaattggaaggatgcacaagttccaaggttacgtttcagcctcccagtagcattggatgcaggaaaaaatacattgacggtgaaaaacaagccgaaccagttgtagttttagatcctgtttctacacatgaaccccaaaccaaagaccaggttgctgaaaaagatccaactcaacacaaggaggatgaaggcgaaattcaaccagaaaacaaagaagacagcattgaaaacgtgagagagacagacagctccaactgctgatccataaaccagaagcctgacatgtttggaagtccttttcaataagcacatgattagtgttgttatattggcaagggctgtagacattctgctctggtcactgtattcagaatacaggttcttttctggtgtcacttttgtaagtagcaactataaacataagtaagctgtttagcaaaacacacattcctagtaggttttggttttttgatctttataaagatgaggtttttttcctagttactgtattaagtatgacttcttttagaaggttacaaaaaaattcagatgttgatacctttttaggaaatgtgcataccactcatcaaatggaatgctgaaagtttgaggtgcttgtatataatcggataaacaaaactgatcaacccaatgtgattttaaaagcccccaaagaagcttctgttttgggtctgatcctcttgatggagaaactgcagcagcatggaaattgttgggtactgtggcatacaagttattttctacagtagactgagataaactgaaaactcaggagctggcatcaaactcgtagtcccatagtcagtgttaattacacacattgttaactattggatgaaaaatacatgctattgattgtgtccaaagcctcccgaggacctccgtggggatgctctggtagcctgaatacagaactgaggtgaaagtccaaaccttgaattttacagtagtaagttggtaaaccatgtgctctgtgctatgagttaattatgttttcccaaatactaatgtggcacaagtaccatattttatcagagttcttatgtacagtatggtgaagataagtgacaagcacacatttttcttgcttcactgctgttctatattacacaggtttgttgttgttttttttaaaaaagaaattaagcagtagttagtctctaaaaatacaatgtttcaggctaccacagtgaataaatagaaatgtaatcagggattaaaaaaaaaacttatgcagcttttcaaagttgattgtttcaaaattggtgtttatttaaaataagtggtaatgtacttgaatgcactttttatgacaatgattcagtaatggtaattttactattaaagaaagtgaaaggtttagttttgttagcatggctcagcatgtagctgtcaggtgtttttcacctaagggcaaaagaaaatgatagtaataattgcagtagttgtattgtattgtatttttgcacgtgtggtaagcataggcttgaagaggtgggtaggcaggtacatgtacttcctaaatttggagataattatctttctgtaagttcgttatgcttgactgtttccatgttctcccaataatgattttatagttacttatcactttactcatggagaattaaaacgtaatgtttttcaactgtatctttctttaactggataatactgctatatgatatgcttactacagactgcattaattcacgaaacgaattctgttatgctgtaatttgaactctcctcaccacaacttattaaaaaggcaccaatagtttcccattaaaaaaaaa

SEQ ID NO: 685 - protein, 631 aa, Homo Sapiens
MNSSDEEKQLQLITSLKEQAIGEYEDLRAENQKTKEKCDKIRQERDEAVKKLEEFQKISHMVIEEVNFMQNHLEIEKTCRESAEALATKLNKENKTLKRISMLYMAKLGPDVITEEINIDDEDSTTDTDGAAETCVSVQCQKQIKELRDQIVSVQEEKKILAIELENLKSKLVEVIEEVNKVKQEKTVLNSEVLEQRKVLEKCNRVSMLAVEEYEEMQVNLELEKDLRKKAESFAQEMFIEQNKLKRQSHLLLQSSIPDQQLLKALDENAKLTQQLEEERIQHQQKVKELEEQLENETLHKEIHNLKQQLELLEEDKKELELKYQNSEEKARNLKHSVDELQKRVNQSENSVPPPPPPPPPLPPPPPNPIRSLMSMIRKRSHPSGSGAKKEKATQPETTEEVTDLKRQAVEEMMDRIKKGVHLRPVNQTARPKTKPESSKGCESAVDELKGILGTLNKSTSSRSLKSLDPENSETELERILRRRKVTAEADSSSPTGILATSESKSMPVLGSVSSVTKTALNKKTLEAEFNSPSPPTPEPGEGPRKLEGCTSSKVTFQPPSSIGCRKKYIDGEKQAEPVVVLDPVSTHEPQTKDQVAEKDPTQHKEDEGEIQPENKEDSIENVRETDSSNC

SEQ ID NO: 686 - DNA, 1917 bp, Homo Sapiens
aatatcttgcatgttacagatttcactactcccaccagcttggagacaacatgtggttcttgacaactctgctcctttgggttccagttgatgggcaagtggacaccacaaaggcagtgatcactttgcagcctccatgggtcagcgtgttccaagaggaaaccgtaaccttgcactgtgaggtgctccatctgcctgggagcagctccacacagtggtttctcaatggcacagccactcagacctcgacccccagctacagaatcacctctgccagtgtcaatgacagtggtgaatacaggtgccagagaggtctctcagggcgaagtgaccccatacagctggaaatccacagaggctggctactactgcaggtctccagcagagtcttcatggaaggagaacctctggccttgaggtgtcatgcgtggaaggataagctggtgtacaatgtgctttactatcgaaatggcaaagcctttaagtttttccactggaattctaacctcaccattctgaaaaccaacataagtcacaatggcacctaccattgctcaggcatgggaaagcatcgctacacatcagcaggaatatcacaatacactgtgaaaggcctccagttaccaactcctgtctggtttcatgtccttttctatctggcagtgggaataatgtttttagtgaacactgttctctgggtgacaatacgtaaagaactgaaaagaaagaaaaagtggaatttagaaatctctttggattctggtcatgagaagaaggtaatttccagccttcaagaagacagacatttagaagaagagctgaaatgtcaggaacaaaaagaagaacagctgcaggaaggggtgcaccggaaggagccccagggggccacgtagcagcggctcagttggtggccatcgatctggaccgtcccctgcccacttgctccccgtgagcactgcgtacaaacatccaaaagttcaacaacaccagaactgtgtgtctcatggtatataactcttaaagcaaataaatgaactgacttcaactgggatacatttggaaatgtggtcatcaaagatgacttgaaatgaggcctactctaaagaattcttgaaaaacttacaagtcaagcctagcctgataatcctattacatagtttgaaaaatagtattttatttctcagaacaaggtaaaaaggtgagtgggtgcatatgtacagaagattaagacagagaaacagacagaaagagacacacacacagccaggagtgggtagatttcagggagacaagagggaatagtatagacaataaggaaggaaatagtacttacaaatgactcctaagggactgtgagactgagagggctcacgcctctgtgttcaggatacttagttcatggcttttctctttgactttactaaaagagaatgtctccatacgcgttctaggcatacaagggggtaactcatgatgagaaatggatgtgttattcttgccctctcttttgaggctctctcataacccctctatttctagagacaacaaaaatgttgccagtcctaggcccctgccctgtaggaaggcagaatgtaactgttctttttgtttaacgattaagtccaaatctccaagtgcggcactgcaaagagacgcttcaagtggggagaagcggcgatatcatagagtccagatcttgcctccagagatttgctttaccttcctgattttctggttactaattagcttcaggatacgctgctctcatacttgggctgtagtttggagacaaaatattttcctgccactgtgtaacatagctgaggtaaaaactgaactatgtaaatgactctactaaaagtttagggaaaaaaaacaggaggagtatgacacacacagcaaaaaaaaaaaaaaaaa

SEQ ID NO: 687 - protein, 280 aa, Homo Sapiens
MWFLTTLLLWVPVDGQVDTTKAVITLQPPWVSVFQEETVTLHCEVLHLPGSSSTQWFLNGTATQTSTPSYRITSASVNDSGEYRCQRGLSGRSDPIQLEIHRGWLLLQVSSRVFMEGEPLALRCHAWKDKLVYNVLYYRNGKAFKFFHWNSNLTILKTNISHNGTYHCSGMGKHRYTSAGISQYTVKGLQLPTPVWFHVLFYLAVGIMFLVNTVLWVTIRKELKRKKKWNLEISLDSGHEKKVISSLQEDRHLEEELKCQEQKEEQLQEGVHRKEPQGAT

SEQ ID NO: 688 - DNA, 2076 bp, Homo Sapiens
attggctgccgcgcggggcggggagcggggtcggctcagtggccctgagaccctagctctgctctcggtccgctcgctgtccgctagcccgctgcgatgttgcgcgctgccgcccgcttcgggccccgcctgggccgccgcctcttgtcagccgccgccacccaggccgtgcctgcccccaaccagcagcccgaggtcttctgcaaccagattttcataaacaatgaatggcacgatgccgtcagcaggaaaacattccccaccgtcaatccgtccactggagaggtcatctgtcaggtagctgaaggggacaaggaagatgtggacaaggcagtgaaggccgcccgggccgccttccagctgggctcaccttggcgccgcatggacgcatcacacaggggccggctgctgaaccgcctggccgatctgatcgagcgggaccggacctacctggcggccttggagaccctggacaatggcaagccctatgtcatctcctacctggtggatttggacatggtcctcaaatgtctccggtattatgccggctgggctgataagtaccacgggaaaaccatccccattgacggagacttcttcagctacacacgccatgaacctgtgggggtgtgcgggcagatcattccgtggaatttcccgctcctgatgcaagcatggaagctgggcccagccttggcaactggaaacgtggttgtgatgaaggtagctgagcagacacccctcaccgccctctatgtggccaacctgatcaaggaggctggctttccccctggtgtggtcaacattgtgcctggatttggccccacggctggggccgccattgcctcccatgaggatgtggacaaagtggcattcacaggctccactgagattggccgcgtaatccaggttgctgctgggagcagcaacctcaagagagtgaccttggagctgggggggaagagccccaacatcatcatgtcagatgccgatatggattgggccgtggaacaggcccacttcgccctgttcttcaaccagggccagtgctgctgtgccggctcccggaccttcgtgcaggaggacatctatgatgagtttgtggagcggagcgttgcccgggccaagtctcgggtggtcgggaacccctttgatagcaagaccgagcaggggccgcaggtggatgaaactcagtttaagaagatcctcggctacatcaacacggggaagcaagagggggcgaagctgctgtgtggtgggggcattgctgctgaccgtggttacttcatccagcccactgtgtttggagatgtgcaggatggcatgaccatcgccaaggaggagatcttcgggccagtgatgcagatcctgaagttcaagaccatagaggaggttgttgggagagccaacaattccacgtacgggctggccgcagctgtcttcacaaaggatttggacaaggccaattacctgtcccaggccctccaggcgggcactgtgtgggtcaactgctatgatgtgtttggagcccagtcaccctttggtggctacaagatgtcggggagtggccgggagttgggcgagtacgggctgcaggcatacactgaagtgaaaactgtcacagtcaaagtgcctcagaagaactcataagaatcatgcaagcttcctccctcagccattgatggaaagttcagcaagatcagcaacaaaaccaagaaaaatgatccttgcgtgctgaatatctgaaaagagaaatttttcctacaaaatctcttgggtcaagaaagttctagaatttgaattgataaacatggtgggttggctgagggtaagagtatatgaggaaccttttaaacgacaacaatactgctagctttcaggatgatttttaaaaaatagattcaaatgtgttatcctctctctgaaacgcttcctataactcgagtttataggggaagaaaaagctattgtttacaattatatcaccattaaggcaactgctacaccctgctttgtattctgggctaagattcattaaaaactagctgctcttaacttacaaaaaaaaaaaaaaaa

SEQ ID NO: 689 - protein, 517 aa, Homo Sapiens
MLRAAARFGPRLGRRLLSAAATQAVPAPNQQPEVFCNQIFINNEWHDAVSRKTFPTVNPSTGEVICQVAEGDKEDVDKAVKAARAAFQLGSPWRRMDASHRGRLLNRLADLIERDRTYLAALETLDNGKPYVISYLVDLDMVLKCLRYYAGWADKYHGKTIPIDGDFFSYTRHEPVGVCGQIIPWNFPLLMQAWKLGPALATGNVVVMKVAEQTPLTALYVANLIKEAGFPPGVVNIVPGFGPTAGAAIASHEDVDKVAFTGSTEIGRVIQVAAGSSNLKRVTLELGGKSPNIIMSDADMDWAVEQAHFALFFNQGQCCCAGSRTFVQEDIYDEFVERSVARAKSRVVGNPFDSKTEQGPQVDETQFKKILGYINTGKQEGAKLLCGGGIAADRGYFIQPTVFGDVQDGMTIAKEEIFGPVMQILKFKTIEEVVGRANNSTYGLAAAVFTKDLDKANYLSQALQAGTVWVNCYDVFGAQSPFGGYKMSGSGRELGEYGLQAYTEVKTVTVKVPQKNS

SEQ ID NO: 690 - DNA, 1180 bp, Homo Sapiens
ggaggggcggggcggacgcagagccgcgtttagtctatcgctgcggttgcgagcgctgtagggagcctgtgctgtgccgcgcagttaggcagcagcagccgcggagcagtagccgccgtgggagggagccatgaagcattacgaggtggagattctggacgcaaagacaagggagaagctgtgtttcttggacaaggtggagccccacgccaccattgcggagatcaagaacctcttcactaagacccatccgcagtggtaccccgcccgccagtccctccgcctggaccccaagggcaagtccctgaaggatgaggatgttctgcagaagctgcccgtgggcaccacggccacactgtacttccgggacctgggggcccagatcagctgggtgacggtcttcctaacagagtacgcggggccccttttcatctacctgctcttctacttccgagtgcccttcatctatggccacaaatatgactttacgtccagtcggcatacagtggtgcacctcgcctgcatctgtcactcattccactacatcaagcgcctgctggagacgctcttcgtgcaccgcttctcccatggcactatgcctttgcgcaacatcttcaagaactgcacctactactggggcttcgccgcgtggatggcctattacatcaatcaccctctctacactccccctacctacggagctcagcaggtgaaactggcgctcgccatctttgtgatctgccagctcggcaacttctccatccacatggccctgcgggacctgcggcccgctgggtccaagacgcggaagatcccataccccaccaagaaccccttcacgtggctcttcctgctggtgtcctgccccaactacacctacgaggtggggtcctggatcggtttcgccatcatgacgcagtgtctcccagtggccctgttctccctggtgggcttcacccagatgaccatctgggccaagggcaagcaccgcagctacctgaaggagttccgggactacccgcccctgcgcatgcccatcatccccttcctgctctgagcgctcacccctgctgaggctcagcccctcaacccggtggcattctgggggaggagtggggcccacagctctccagcacccggaataaagcccgcctgccccagtcggaaaaaaaaaaaaaaa

SEQ ID NO: 691 - protein, 308 aa, Homo Sapiens [sequence omitted]

SEQ ID NO: 692 - DNA, 2242 bp, Homo Sapiens
gaatctcgacccttgaatggagttacacgaacggccagatgaaagaaggaaggcccggacctccactcagggccgactaggggactggcggagggtgcacgctgatggatttactcaccgggtgcttggagctccagcagctggctggagcccgcgatgacgtcacggactcgggtcacatggccaagtccgccccgccccctccccgtccccgccgctgcagcggtcgccttcggagcgaagggtaccgacccggcagaagctcggagctctcggggtatcgaggaggcaggcccgcgggcgcacgggcgagcgggccgggagccggagcggcggaggagccggcagcagcggcgcggcgggctccaggcgaggcggtcgacgctcctgaaaacttgcgcgcgcgctcgcgccactgcgcccggagcgatgaagatggtcgcgccctggacgcggttctactccaacagctgctgcttgtgctgccatgtccgcaccggcaccatcctgctcggcgtctggtatctgatcatcaatgctgtggtactgttgattttattgagtgccctggctgatccggatcagtataacttttcaagttctgaactgggaggtgactttgagttcatggatgatgccaacatgtgcattgccattgcgatttctcttctcatgatcctgatatgtgctatggctacttacggagcgtacaagcaacgcgcagcctggatcatcccattcttctgttaccagatctttgactttgccctgaacatgttggttgcaatcactgtgcttatttatccaaactccattcaggaatacatacggcaactgcctcctaattttccctacagagatgatgtcatgtcagtgaatcctacctgtttggtccttattattcttctgtttattagcattatcttgacttttaagggttacttgattagctgtgtttggaactgctaccgatacatcaatggtaggaactcctctgatgtcctggtttatgttaccagcaatgacactacggtgctgctacccccgtatgatgatgccactgtgaatggtgctgccaaggagccaccgccaccttacgtgtctgcctaagccttcaagtgggcggagctgagggcagcagcttgactttgcagacatctgagcaatagttctgttatttcacttttgccatgagcctctctgagcttgtttgttgctgaaatgctactttttaaaatttagatgttagattgaaaactgtagttttcaacatatgctttgctggaacactgtgatagattaactgtagaattcttcctgtacgattggggatataatgggcttcactaaccttccctaggcattgaaacttcccccaaatctgatggacctagaagtctgcttttgtacctgctgggccccaaagttgggcatttttctctctgttccctctcttttgaaaatgtaaaataaaaccaaaaatagacaactttttcttcagccattccagcatagagaacaaaaccttatggaaacaggaatgtcaattgtgtaatcattgttctaattaggtaaatagaagtccttatgtatgtgttacaagaatttcccccacaacatcctttatgactgaagttcaatgacagtttgtgtttggtggtaaaggattttctccatggcctgaattaagaccattagaaagcaccaggccgtgggagcagtgaccatctgctgactgttcttgtggatcttgtgtccagggacatggggtgacatgcctcgtatgtgttagagggtggaatggatgtgtttggcgctgcatgggatctggtgcccctcttctcctggattcacatccccacccagggcccgcttttactaagtgttctgccctagattggttcaaggaggtcatccaactgactttatcaagtggaattgggatatatttgatatacttctgcctaacaacatggaaaagggttttcttttccctgcaagctacatcctactgctttgaacttccaagtatgtctagtcaccttttaaaatgtaaacattttcagaaaaatgaggattgccttccttgtatgcgctttttaccttgactacctgaattgcaagggatttttatatattcatatgttacaaagtcagcaactctcctgttggttcattattgaatgtgctgtaaattaagttgtttgcaattaaaacaaggtttgcccacatccaagaaaaa

SEQ ID NO: 693 - protein, 317 aa, Homo Sapiens
MTSRTRVTWPSPPRPLPVPAAAAVAFGAKGTDPAEARSSRGIEEAGPRAHGRAGREPERRRSRQQRRGGLQARRSTLLKTCARARATAPGAMKMVAPWTRFYSNSCCLCCHVRTGTILLGVWYLIINAVVLLILLSALADPDQYNFSSSELGGDFEFMDDANMCIAIAISLLMILICAMATYGAYKQRAAWIIPFFCYQIFDFALNMLVAITVLIYPNSIQEYIRQLPPNFPYRDDVMSVNPTCLVLIILLFISIILTFKGYLISCVWNCYRYINGRNSSDVLVYVTSNDTTVLLPPYDDATVNGAAKEPPPPYVSA

SEQ ID NO: 694 - DNA, 2631 bp, Homo Sapiens
tctggggccggactagcccagcgcgtctgcctacccatagggattccctctccagccaatccagtcagagcagcggagctgccccgaacaaagatggcgcgggaagcgtctgtgagggcagactgatccgagcacccaaaccctcggcggacagcggagccagtggtagccgcacggccctaaaaccatggaggagggcggcagcactggcagtgctggcagtgacagcagcaccagcgggagtggcggggcgcagcaaagggagctggagcgcatggctgaggtcttggtcaccggggaacagctacggctcaggctgcacgaagaaaaggttattaaagatagacgtcatcatctcaagacctacccaaactgttttgtcgcaaaagaactgattgactggctgattgaacacaaagaggcttctgacagagagacggcaattaaactcatgcagaaattagcagaccggggcattattcaccatgtgtgtgatgagcataaggaattcaaggatgtcaaactcttctaccgctttagaaaggatgacggcaccttcccattggataatgaagtgaaggcctttatgagaggacagaggctatatgaaaagctgatgagccctgaaaacacactcctgcagcccagggaggaggaaggggtcaagtatgagcgcaccttcatggcatctgaattcctggactggctggttcaggaaggtgaggccaccacgaggaaagaggcagagcagctttgccaccggcttatggagcatggcatcatccagcatgtgtccaacaagcacccatttgtggacagcaatcttctctaccagttcagaatgaacttccggcggaggcgaagactgatggagctgctcaatgaaaagtccccctcctcccaggaaactcatgacagtcccttctgcctgaggaagcagagccatgacaatcggaaatctaccagctttatgtcagtgagccccagcaaggagatcaagatcgtgtctgcagtgaggagaagcagcatgagcagctgtggcagcagcggctacttcagcagcagccccaccctcagcagcagcccccctgtgctctgcaaccccaagtccgtgctgaagagacctgtcacctctgaggaactccttactcccggggctccgtatgcaaggaagacattcacgattgttggtgacgcggttggctggggttttgtggtgcgaggaagtaagccatgccacatccaggctgtagaccccagtggccctgcagccgcagcaggaatgaaggtctgtcagtttgtcgtctctgtcaacgggctcaatgtcctgcatgtagactaccggaccgtgagcaatctgattctgacgggcccacggacgattgtcatggaagtcatggaggagttagagtgctgagctcctgggcctcccagccctccagtggcctgtgggtgagggaagccagaatgacacaaagcaatgcaaagacaagattgccatgcaaatggatggttttggacatacgagtcttctccgcacatacatgtctaaagttgagttttatacactgaatgtggaagaaccgggtatcatatcttttttaaaaaatgtcagtgtagaaaacatttgggaaaccattttcctacatgatagaactgccttactagatttctatttgtagctctcattcattgttttttatcttagtttgcagaaaggtgttgaaatgcttctctagcccaaacagcgacatgctaaagtccccttcttcagagtcaatagagtagttgttaaaggttttaaattgtactttctccaaaattagcatgcagctatttaatagggaatctagatttcaccaagattcaaatcaaagcaacatttaaaggaataagacctgttcactagcattttcaagggggttctaaagcattcaagtgcttaaaagccataaaaaatgacttcttaattcctgcctttagtgtcaacttttaagttaatacaggtttcaattgtggcattaggaaaaaaaaaaaccttgtgatgctatggttgggggtagttagggagagactacatgaaattgtgtgcccctattttctttctgatcctaaatcattttgttttataaatcagctatagcatctttctagaattaatcctgaatatgttgaatgttaaaatagagaagtttgtatatacacataattaaaaatcaacccttctggcaagatttcactttgaaggtgtctgtttttaagggaaggctaaaactttgctgatatgtgataaaacttgaactctaaattgcctccttagcctgaatttttactagctttctagtgtaacatattctaaggacatgacatgctgcttatttggggggattatttttcaccaaaatgatcatcttgtgttgtaacttttcagctcacttgtatatacgcacgttttcatttttggtctagaaaatagtgcattttggggctcagcgtgcagaggaaattcctcaaagtgccaaattaggcagtcaggaaatactaaattcttcattccaaataatggatctgaatgatgacgttaattttttatcatgcattaacaaaataaaatatgagaattgtaccaca

SEQ ID NO: 695 - protein, 409 aa, Homo Sapiens
MEEGGSTGSAGSDSSTSGSGGAQQRELERMAEVLVTGEQLRLRLHEEKVIKDRRHHLKTYPNCFVAKELIDWLIEHKEASDRETAIKLMQKLADRGIIHHVCDEHKEFKDVKLFYRFRKDDGTFPLDNEVKAFMRGQRLYEKLMSPENTLLQPREEEGVKYERTFMASEFLDWLVQEGEATTRKEAEQLCHRLMEHGIIQHVSNKHPFVDSNLLYQFRMNFRRRRRLMELLNEKSPSSQETHDSPFCLRKQSHDNRKSTSFMSVSPSKEIKIVSAVRRSSMSSCGSSGYFSSSPTLSSSPPVLCNPKSVLKRPVTSEELLTPGAPYARKTFTIVGDAVGWGFVVRGSKPCHIQAVDPSGPAAAAGMKVCQFVVSVNGLNVLHVDYRTVSNLILTGPRTIVMEVMEELEC

SEQ ID NO: 696 - DNA, 2268 bp, Homo Sapiens
aatatcttgcatgttacagatttcactgctcccaccagcttggagacaacatgtggttcttgacaactctgctcctttgggttccagttgatgggcaagtggacaccacaaaggcagtgatcactttgcagcctccatgggtcagcgtgttccaagaggaaaccgtaaccttgcactgtgaggtgctccatctgcctgggagcagctctacacagtggtttctcaatggcacagccactcagacctcgacccccagctacagaatcacctctgccagtgtcaatgacagtggtgaatacaggtgccagagaggtctctcagggcgaagtgaccccatacagctggaaatccacagaggctggctactactgcaggtctccagcagagtcttcacggaaggagaacctctggccttgaggtgtcatgcgtggaaggataagctggtgtacaatgtgctttactatcgaaatggcaaagcctttaagtttttccactggaattctaacctcaccattctgaaaaccaacataagtcacaatggcacctaccattgctcaggcatgggaaagcatcgctacacatcagcaggaatatctgtcactgtgaaagagctatttccagctccagtgctgaatgcatctgtgacatccccactcctggaggggaatctggtcaccctgagctgtgaaacaaagttgctcttgcagaggcctggtttgcagctttacttctccttctacatgggcagcaagaccctgcgaggcaggaacacatcctctgaataccaaatactaactgctagaagagaagactctgggttatactggtgcgaggctgccacagaggatggaaatgtccttaagcgcagccctgagttggagcttcaagtgcttggcctccagttaccaactcctgtctggtttcatgtccttttctatctggcagtgggaataatgtttttagtgaacactgttctctgggtgacaatacgtaaagaactgaaaagaaagaaaaagtgggatttagaaatctctttggattctggtcatgagaagaaggtaatttccagccttcaagaagacagacatttagaagaagagctgaaatgtcaggaacaaaaagaagaacagctgcaggaaggggtgcaccggaaggagccccagggggccacgtagcagcggctcagtgggtggccatcgatctggaccgtcccctgcccacttgctccccgtgagcactgcgtacaaacatccaaaagttcaacaacaccagaactgtgtgtctcatggtatgtaactcttaaagcaaataaatgaactgacttcaactgggatacatttggaaatgtggtcatcaaagatgacttgaaatgaggcctactctaaagaattcttgaaaaacttacaagtcaagcctagcctgataatcctattacatagtttgaaaaatagtattttatttctcagaacaaggtaaaaaggtgagtgggtgcatatgtacagaagattaagacagagaaacagacagaaagagacacacacacagccaggagtgggtagatttcagggagacaagagggaatagtatagacaataaggaaggaaatagtacttacaaatgactcctaagggactgtgagactgagagggctcacgcctctgtgttcaggatacttagttcatggcttttctctttgactttactaaaagagaatgtctccatacgcgttctaggcatacaagggggtaactcatgatgagaaatggatgtgttattcttgccctctcttttgaggctctctcataacccctctatttctagagacaacaaaaatgctgccagtcctaggcccctgccctgtaggaaggcagaatgtaactgttctgtttgtttaacgattaagtccaaatctccaagtgcggcactgcaaagagacgcttcaagtggggagaagcggcgataccatagagtccagatcttgcctccagagatttgctttaccttcctgattttctggttactaattagcttcaggatacgctgctctcatacttgggctgtagtttggagacaaaatattttcctgccactgtgtaacatagctgaggtaaaaactgaactatgtaaatgactctactaaaagtttagggaaaaaaaacaggaggagtatgacacaaaaaaaaaaaaaaaaaaaaaaaaaaaaaaaaaaaaaaaaaaaaaaaaaaaaaaaaaaaaaaaaaaaaaaaaaaaaaaaaaaaaaaaaaaaaa

SEQ ID NO: 697 - protein, 374 aa, Homo Sapiens
MWFLTTLLLWVPVDGQVDTTKAVITLQPPWVSVFQEETVTLHCEVLHLPGSSSTQWFLNGTATQTSTPSYRITSASVNDSGEYRCQRGLSGRSDPIQLEIHRGWLLLQVSSRVFTEGEPLALRCHAWKDKLVYNVLYYRNGKAFKFFHWNSNLTILKTNISHNGTYHCSGMGKHRYTSAGISVTVKELFPAPVLNASVTSPLLEGNLVTLSCETKLLLQRPGLQLYFSFYMGSKTLRGRNTSSEYQILTARREDSGLYWCEAATEDGNVLKRSPELELQVLGLQLPTPVWFHVLFYLAVGIMFLVNTVLWVTIRKELKRKKKWDLEISLDSGHEKKVISSLQEDRHLEEELKCQEQKEEQLQEGVHRKEPQGAT

SEQ ID NO: 698 - DNA, 4802 bp, Homo Sapiens
atatttcaggggatatgaatcccctacattaagtaaggattatgagggctacccagccccagcaatgccagattttcaacctggggataccacagtaagactagacaaaagaatgtctcttactgcaatatatgacaagaggagagagacagattatagtgacaaaggatataatttagcttttgtttctcaagatgaacaagaaaattcttcctttactatattatacgaagagccccttcaagaggaggacaagtatgcttccgcagaagcaagacaaacacagtctgtcttgtttcatgatacgtccgctgacagcatgcctgttctggcatgtgaaaggtctgagagtagaactgaccttgtccatcactttgaaaaaggtactaaattaggtgagacatttgatagtgatagttcagaaatgttcttatcagtggaggccaaaaggtacaaaatttatcctttagcattgtctcccatttatgaggatgacagctcacaggaggacattctatctagtgaggtttcacctggtcaccatggccccaggaaatcaagagacagtgaaaaccagtcctcttctgttttatcccttctccagtcagtgtcagaacgtttaaagatgaattttgatgaagatgacagagaggcagctgatgaggaagaagaggaggaggaggcagcagtattgcataaaggagatctgagagctggaagtggggagcgtgttaccttccagttgccagatccttccatcacattttaccctgatgaccaggagagcgttggaatttctaagaattcatatgtgatgccaaatgaacctactacctccaatctgcaagttggtctgtggccagaaaagacctcgtttctccagaaatctgaccttacttctaaactacattcttctttaaagagtgcttatcatcagtatctgcagacttcccaaagtcattcctcagaaaaaggagccagatttggtggaatttttcaggaaccagtgtcaaaatatttccgtgttcaagacagcccaggcagattgagcccatttatagagaatgttgacaaacaaactctgagatgtaacccaagacctgggaagatggttatctatgatctccatgaaagtacatataaacaagaagtctactgtaatattcctgatgctacatcatggtcttttccaaatggagttctaataaaagttgtaaggggctgctggattttatatgagaaaccacatttccgaggtcagaaatgtgtgctagaagaaggggaaaaggtgttaaatcgtgactggattcttcagaacagaaggcatccacaaagaaactttatattgggttctctcaaacgtgtcttaaaggactgcagcattccagaaatagagcttttcccacaatctgacccagcctgttgtcctgtctacatacagagagcagtccccaatttggaagaactgaatatctccaaatctgtgtccttcactgtgaagtcaggagtttggcttgcctacccagatattaattttaagggacaagctacagttctggaggaagaccatgggctctttgagatttctacagcagaaatgaaatcattacatccgcttcaaatgggtggactgaaagtggaaatgcccatgaacttaaaggttattatttatgaaaaacctcacttccatggacaggctaaagagtttagtgaacatatagattctgttcctaattttttgaaaaataatggagattttcacagaattggatcaattcgtgtcattggtggagtgtgggttgcctatgaaaaagaacattttaaaggccagcagtttctgcttgaagaaggagactttgaagacagtaatgcttgtggtgcattaagtagccctatcttgtctttccggtacttacaagctaattttatagaatcttctgtcacactatttgaatctgacctagaaagtgggaagtttattgacattacaaatcaggaaatttctgatttggaagaaattggctttggcagtaaaacaagatccattcatgttaaaagtggagtatgggttgcctaccagcaaaagttcttctgtggagaacaatacattttagaaaaagggaaatacaaatgcttttttgactggggaggatcaaataatataatcatgtcgatacggccaatccaactggaaccacttgggataaatgaacctccgcatttgctcaaagcattcagcaaaccagggttccaaggtgaatgtatagattttacagaagaaacttctgatttgacttcactcatgccatgttcttttaaagttcttcgaggttgctggctcctctattaccaagaagacatgtttgttaatcactgtgtgttagaagaaggcctctatgctgaccttacttcctgcggttgcccagcatctaaagtcaaatctctcaagcccattgactatgtttttgaagaaccctccatcagcctttttgctctggagcattgtgagggaagagagttacatctagaagaggctgtgaactctgttctgaacaaggacctacacttctacacccagtctgtgtgggtaaaaagtggactatggatagcttatgaaggatccaatttcttgggaagacaaatcctactcaggcctaatgagatcccaaactggacagcattcagcagatggaaaacaattggttccctccgtcctatgaagcagcctgcagtgtacatcagaataaagaaccgtgcccagggtgaatatctgacagtcactggaagtctagcagacaccagggcaacatctgtgtgcatttctccctatagtggaaagaatactcagatctggtactactgccgaggactctttaaatccaaggccagtgatacatgtcttgatgtgattggtggccgggacacacctggagctaaagtagctctatggactgaacatgggcaattcaggcagaagtggagactgaataaaaatggaactatcagctcttatctcagtgatcaacttgtccttgatgttaaaggaggaaattattgtgacaagactcatgtaattgtaaatcagcccctggagggagaagaaacacagaaatgggacattgaaatattgtgagagaatcaacatccctagaaagatccctagaaagagcaaagaaggaaacacatctgtcattgtcttgtggacgtggaaaggaagctactgtcctcacactcctggatcactgagcagaatgaacattttctccagcctctgagactatcgctcttaaccatggaaaagctcaaaatattcttgccattactcagtgttcctataaagaaaatattatgatatcttggaaaggttctattcctgatctccagctgtggtgagcaagtttcctgaagtgtttattttctctcatatccaccaaacgtgaatcctgttcctgatggcccgttattggacactggtgatgctattatcctgtattatttattaatatcctacctagatgcttgtatgagtacaaagcataaagaaacagatttctataggtcaagtcatacttttgcaaacagatgagtaattttttagcaacacctgaaaatatactaaactttcctagataaactttaaggtttctatactgaggcttttataatgaacgcacctcgttaagtatttatacttgtaactaaccccaggcagggacctcagctttgttaggaataaggcacaagaagtattttctgtagctattgtttcctcagtccttcaaactaaaaaagtacaaataaataacctatggccaaacttgcactgttacgtgttaaccaagacatccctttaggtgacaagactctataacagtggttacctgtctccatgttgacacttcatcctagatttaaggagaggcatcaatttttttttttttttgcctcaagagaaatttcaaatatccaaattaaaacacagtagcatttgaaccttgaccttaccatctctttaagtaaacgtggagttgatttctctactaaataacagaaacctcagtttttcactcccattgtaagtaacttttatttaagtaagtaaaatcaggtaggaaatcacctttgacttagcttccagtagtcattaccaccttttactgcacaattcacaagcatgttttcctggtgaattggactgaaaattacattttgacaactttttttccttttatccccaacttttgccagaaagcagaaaaatgctctatttttataaagaaagattaaattctccaatgatattttaaaaaatatcaacctacatgcactttagaatgtaaaataacaatgactattttaaactcgaagacccactattttgagtattttttatagactttaaatactgggtttttttcctccttcaatctcaggcttttctccatcttttaagcagcctctgtaactcccttttgtccataggtgttgcgtgcctctcatctgtggggaagtattatttaataaaatttatgttacaggataactttattttaatgggcatgggcttgtctatacacaaaggtatgtatattttcattataaaaaaccagtttaaaattttttcttattttaattgtttgaaatttttctagagccaaagaagctctttaaagaagttgtttcttccaaagaacaaagccaggttaatgacattcaattctaaatgatacattggaattgtgccttttctaccacactggattaaataaacttgtcaaaatatggaaaaaaaaaaaaaaaaa

SEQ ID NO: 699 - protein, 1022 aa, Homo Sapiens
MPDFQPGDTTVRLDKRMSLTAIYDKRRETDYSDKGYNLAFVSQDEQENSSFTILYEEPLQEEDKYASAEARQTQSVLFHDTSADSMPVLACERSESRTDLVHHFEKGTKLGETFDSDSSEMFLSVEAKRYKIYPLALSPIYEDDSSQEDILSSEVSPGHHGPRKSRDSENQSSSVLSLLQSVSERLKMNFDEDDREAADEEEEEEEAAVLHKGDLRAGSGERVTFQLPDPSITFYPDDQESVGISKNSYVMPNEPTTSNLQVGLWPEKTSFLQKSDLTSKLHSSLKSAYHQYLQTSQSHSSEKGARFGGIFQEPVSKYFRVQDSPGRLSPFIENVDKQTLRCNPRPGKMVIYDLHESTYKQEVYCNIPDATSWSFPNGVLIKVVRGCWILYEKPHFRGQKCVLEEGEKVLNRDWILQNRRHPQRNFILGSLKRVLKDCSIPEIELFPQSDPACCPVYIQRAVPNLEELNISKSVSFTVKSGVWLAYPDINFKGQATVLEEDHGLFEISTAEMKSLHPLQMGGLKVEMPMNLKVIIYEKPHFHGQAKEFSEHIDSVPNFLKNNGDFHRIGSIRVIGGVWVAYEKEHFKGQQFLLEEGDFEDSNACGALSSPILSFRYLQANFIESSVTLFESDLESGKFIDITNQEISDLEEIGFGSKTRSIHVKSGVWVAYQQKFFCGEQYILEKGKYKCFFDWGGSNNIIMSIRPIQLEPLGINEPPHLLKAFSKPGFQGECIDFTEETSDLTSLMPCSFKVLRGCWLLYYQEDMFVNHCVLEEGLYADLTSCGCPASKVKSLKPIDYVFEEPSISLFALEHCEGRELHLEEAVNSVLNKDLHFYTQSVWVKSGLWIAYEGSNFLGRQILLRPNEIPNWTAFSRWKTIGSLRPMKQPAVYIRIKNRAQGEYLTVTGSLADTRATSVCISPYSGKNTQIWYYCRGLFKSKASDTCLDVIGGRDTPGAKVALWTEHGQFRQKWRLNKNGTISSYLSDQLVLDVKGGNYCDKTHVIVNQPLEGEETQKWDIEIL

SEQ ID NO: 700 - DNA, 1365 bp, Homo Sapiens
atgcagctcagcctgggctacacagccaggtgtcagatgtgtctctgctgatctgagtctgcctgtggcatggacctgcatcttccctgaagcatctccagggctgaaaaatcactgaccatggcaccatggtctcatccatctgcacagctgcagccagtgggaggagacgccgtgagccctgccctcatggttctgctctgcctcgggctgagtctgggccccaggacccacgtgcaggcagggaacctctccaaagccaccctctgggctgagccaggctctgtgatcagccgggggaactctgtgaccatccggtgtcaggggaccctggaggcccaggaataccgtctggttaaagagggaagcccagaaccctgggacacacagaacccactggagcccaagaacaaggccagattctccatcccatccatgacagagcaccatgcagggagataccgctgttactactacagccctgcaggctggtcagagcccagcgaccccctggagctggtggtgacaggattctacaacaaacccaccctctcagccctgcccagtcctgtggtgacctcaggagagaacgtgaccctccagtgtggctcacggctgagattcgacaggttcattctgactgaggaaggagaccacaagctctcctggaccttggactcacagctgacccccagtgggcagttccaggccctgttccctgtgggccctgtgacccccagccacaggtggatgctcagatgctatggctctcgcaggcatatcctgcaggtatggtcagaacccagtgacctcctggagattccggtctcaggagcagctgataacctcagtccgtcacaaaacaagtctgactctgggactgcctcacaccttcaggattacgcagtagagaatctcatccgcatgggcatggccggcttgatcctggtggtccttgggattctgatatttcaggattggcacagccagagaagcccccaagctgcagctggaaggtgaacagaagagagaacaatgcaccattgaatgctggagccttggaagcgaatctgatggtcctaggaggttcgggaagaccatctgaggcctatgccatctggactgtctgctggcaatttctttttttctttcttttcttttctttcttttttttttttttttttttttttttgagatggagtcttgctctgtcaccaggctggaatgcagtggcgcaatctgggctcactgcaacctccgcctctcgggttcaagtgattctcctgcctcagcctctggcaatttctagagggaggaatgggtgtttgagtgcagagacactggtctggggtgatccatggagga

SEQ ID NO: 701 - protein, 299 aa, Homo Sapiens
MAPWSHPSAQLQPVGGDAVSPALMVLLCLGLSLGPRTHVQAGNLSKATLWAEPGSVISRGNSVTIRCQGTLEAQEYRLVKEGSPEPWDTQNPLEPKNKARFSIPSMTEHHAGRYRCYYYSPAGWSEPSDPLELVVTGFYNKPTLSALPSPVVTSGENVTLQCGSRLRFDRFILTEEGDHKLSWTLDSQLTPSGQFQALFPVGPVTPSHRWMLRCYGSRRHILQVWSEPSDLLEIPVSGAADNLSPSQNKSDSGTASHLQDYAVENLIRMGMAGLILVVLGILIFQDWHSQRSPQAAAGR

SEQ ID NO: 702 - DNA, 2268 bp, Homo Sapiens; identical to SEQ ID NO: 696

SEQ ID NO: 703 - protein, 374 aa, Homo Sapiens; identical to SEQ ID NO: 697

SEQ ID NO: 704 - DNA, 3085 bp, Homo Sapiens
attggacaatgcgcgtccgccacgacgcaggaaggccgcctcattggtccgcgctgtcgggcttcggcggcttttctctttagcgctcagggcgctgacccactgctcttcctcttaagaaagtgctccattccttccggcgcccggagctgctggcccaaagggatccggagcgagctagggcagacaccatgaccacccttgatgataagttgctgggggagaaactgcagtactactatagcagcagtgaggatgaggacagtgaccacgaggacaaggaccgaggcagatgtgccccagccagcagttctgtgcctgcagaggctgagctggcaggcgaaggcatctcagttaacacaggcccaaaaggtgtgatcaatgactggcgccgcttcaagcagttggagacagagcagagggaggagcagtgccgggagatggaaaggctgatcaagaagctgtcaatgacttgcaggtcccatctggatgaagaggaggagcaacagaaacagaaagacctccaggagaagatcagtgggaagatgactctgaaggagtttgccataatgaatgaggaccaagatgatgaagagtttctgcagcagtaccggaagcagcgaatggaagagatgcggcagcagcttcacaaggggccccaattcaagcaggtttttgagatctccagtggagaagggtttttagacatgattgataaagaacagaaaagcattgtcatcatggttcatatttatgaggatggcattccagggaccgaagccatgaatggttgcatgatctgccttgccgcagagtacccagctgtcaagttctgcaaggtgaagagctcagttattggcgccagcagtcagttcaccaggaatgcccttcctgccctgctgatctataaggggggtgaattgatcggcaattttgttcgtgttactgaccagctgggggatgatttctttgctgtggaccttgaagcttttctccaggaatttggattactcccagaaaaggaagtcttggtgctgacatctgtgcgtaactctgccacgtgtcacagtgaggatagcgacctggaaatagattgaactgatagtctagttgcatagatttctcattgtttgggttggaatacacgtcattgtttatttttgttcctttgtcttctggcttttcagctgttctttgtagtcccttttattatgcataaaataaagaaattcttagattaaatcagaatgctgaataaccttgtagctagcaataaggtgacttacagttgtataaacaggaagccaggcttttgaactgtttacttaagattctgtggtgtgacatctctgttattgtttccagtcaatatttacaaagcatcctaaagacagggtcttggaaattgtcttcagatgatcttagaggtctctgccaagtctgagagtataattctgtaggtattgtgttatttgcaacgtaaatagtgcattttcttaatcaaatgattgtaaattatatttacttgtaatcagttccatagctttagacggtggttagattttttttttccccaccagggtcttgtttaaaggggtgagccaccgcacccagtcctgaggggtggcctctgctgctggatttcatgtcttcctccagcatgactaagtctggaacagcaggaagggttgatgcttactgacctggtgatgttagaagacaagtagtttatggatttaaacattagagctggagtggggctggaaatctttgtaaaggaagttctttcagtaagatgcccctgcttgtctttgtctcttttttgtttaacaaggtaactttttgtttaacaaggtaactttttgtttaacctagattttttttaaaactttttttttttttcatattggaaaagtaattcatattcagtagaggaaaactgaccaaaacagaagcaaaaataagaaaattaaaataatctctaatcctactacctagaataaaacactattaatattttggtctgtttcctgccaaggtgttttctgtgtatacatggatattttgtttgtttttaaacaaaacgatgggatcattctgaacatactgttctatagtatggtcagctaataatatatcagacctttttttatattattaaatattctacaactttttaaaaatgtctattaatattccatcgtatagatgtgatataatttgcttgatggttgtctcttaaaaagaaagatagcaaatactttttttaaattacaaaagtgatagatgttcattgtagaaaatgtaataaacactgttaagacttaaaagccatataattccaccaaccaaaattaatcccttttgtcatatttctagtcatttttatagcctttttttctatgtatttataataattatcatttgcgtttttttcctttttttaactttaaaaatgtatattctagggtcaggggaaatgtaatctggaattaaatattagccttaaaattcacaattttgattttcctggcttttcaggaattgactaactgtaaaagagtcttgaaagtatttagtcaacaaacagagtgcattttttttttttttgactaagaaagctcgttgtagtagaaagggtggaatgtattgaaaattattagaagcagggaagtattgttagtctagcttatttcctttcagtcttttttcaatatttttataaacattgagtacttactgaatttagttctgtgctcttccttatttagtgttgtatcataaatactttgatgtttcaaacattctaaataaataattttcagtggcttcataatatttcatcatttggatatataataatttatttaaccagtctctttatttttatttatttattttgtttgttttctttgagatggagtctcgctctgtcacccaggctggagtacaatagcgtgatctcggctcactgcaacctccacctcctgggttcaagcagttctcctgcctcagcctcctgagtagctgggactacaggcacatgccatcacgcctggctaatttttgtatttttactagagac

SEQ ID NO: 705 - protein, 301 aa, Homo Sapiens
MTTLDDKLLGEKLQYYYSSSEDEDSDHEDKDRGRCAPASSSVPAEAELAGEGISVNTGPKGVINDWRRFKQLETEQREEQCREMERLIKKLSMTCRSHLDEEEEQQKQKDLQEKISGKMTLKEFAIMNEDQDDEEFLQQYRKQRMEEMRQQLHKGPQFKQVFEISSGEGFLDMIDKEQKSIVIMVHIYEDGIPGTEAMNGCMICLAAEYPAVKFCKVKSSVIGASSQFTRNALPALLIYKGGELIGNFVRVTDQLGDDFFAVDLEAFLQEFGLLPEKEVLVLTSVRNSATCHSEDSDLEID

SEQ ID NO: 706 - DNA, 4299 bp, Homo Sapiens
gcccacccgctgaccaacgccgccgcccccgccgggcggtgctgtgtccccgcaggagtcggagaggatggcaggggccggaggccagcaccaccctccgggcgccgctggaggagcggccgccggagccggcgccgcggtcacctccgccgctgcctcggcggggccgggagaggattcgtctgacagcgaagcggagcaagagggaccccagaaactgatccgcaaagtgtctacctcggggcagatccggaccaagaccagtattaaagagggacagctattgaagcaaaccagttctttccaaaggtggaaaaagcgatacttcaaacttcgaggccgcaccctttactatgcaaaggactcaaagtctctgatatttgatgaagttgacctctcagatgctagtgtagctgaagcaagcacgaaaaatgctaacaacagcttcacgatcatcactccattcagaaggctaatgctgtgtgctgagaacagaaaggagatggaggattggatcagctcactgaagtctgtacagaccagagaaccctacgaggtggcccagtttaatgtggaacatttctcagggatgcacaactggtacgcctgctcccacgcccgacccaccttctgtaacgtgtgcagagagagtctttctggagtcacctcccatggcctgtcctgcgaagtgtgtaaattcaaggctcacaaaagatgtgcagtgagagcaacaaataactgtaaatggactaccctggcctccatcgggaaggacattatagaagatgaagatggcgtcgcgatgcctcaccagtggcttgagggcaacctgcctgtaagtgccaagtgtgctgtctgcgacaaaacatgtggcagtgttctccgtctacaggattggaaatgcctttggtgtaagacaatggtacacactgcctgcaaagatttataccatccaatatgtccacttggtcaatgtaaagtatctatcatacctccaattgcactaaacagcaccgattccgatggtttctgtagagcaacattttcgttctgtgttagtcctctattggtttttgtcaattctaagagtggagataatcagggagtaaagttcctccgtcgctttaaacagttgctaaatccggctcaggtgtttgatttaatgaatggaggtcctcatttaggtttaagattatttcagaagtttgacaatttccggattcttgtttgtggaggcgatggaagtgtaggttgggttttgtcagaaatcgataagctcaacttgaataaacagtgtcagctgggagtgttgcctttgggtacaggaaatgaccttgcccgagttcttggctggggaggttcatatgacgatgacacccaacttcctcagatcctagagaaactggaacgagccagtaccaaaatgttggacaggtggagtataatgacatatgaactcaaattgccaccaaaagcttccctacttccaggacctccagaagcatctgaagaattttatatgacgatttatgaagactcagttgcaacgcatcttacaaaaatcctcaattctgatgaacatgcagtggtcatatcttctgccaagacgctatgtgaaactgtaaaggacttcgttgccaaagtagaaaagacgtatgacaaaaccttggaaaatgccgttgtagctgatgccgtggccagtaaatgttcagtcctaaacgagaagctcgaacaactgctgcaggctttgcacacagattcccaggctgcgcctgttctccctggcctcagccctctcattgtggaagaagatgctgtggaatcgtccagtgaagagtccctgggtgaaagcaaagagcagcttggggatgacgttacaaaaccttcctcccagaaagccgtcaaaccaagggaaatcatgttgcgggcaaatagtttaaagaaagcagtgaggcaagtcattgaggaagccggaaaagttatggatgacccgacagttcacccctgtgaaccagctaatcagtcctctgattatgacagcacagaaacagatgaatctaaggaggaagctaaagatgatggtgccaaagaatcaataactgttaaaactgcacctcggtctccagatgcccgggcaagttatggccattcccaaactgattctgtccctggtccagctgtggcagccagcaaagaaaacctccctgtgctcaataccagaataatctgcccaggtttaagagcaggactggctgcctcaattgctgggagttcgattatcaacaaaatgttactggcaaacattgatccttttggtgccacgccgtttattgacccggatctagattccgtagatggatattcagaaaaatgtgtcatgaacaattactttgggattggattagatgcaaaaatttcattagaatttaataataaaagagaggagcaccctgaaaaatgcaggagccgaactaaaaacttgatgtggtatggagtccttggaacccgggagttattacagagatcgtacaagaatttagaacaaagggttcaacttgagtgtgatgggcagtatattcctcttcccagcttgcaaggcatagccgtgttgaacattcccagctatgctggaggcactaacttttggggtggaactaaagaggatgatatatttgctgcaccatcctttgatgacaagatcctggaagttgtagcaatatttgatagcatgcaaatggcagtttcaagggtcattaaactgcagcatcatcgaatagcccagtgccgtacagtgaaaatcactatatttggtgacgaaggagtcccagtgcaagtggatggtgaagcgtgggttcagcctccagggattatcaaaattgtgcacaaaaacagagcacaaatgctaacaagggacagagcctttgagagcactctgaaatcttgggaagataagcagaagtgtgattctggtaaaccagttctccgaacccatttgtacatccatcacgccattgacttggcaacagaagaggtgtcgcagatgcagctatgctcccaggctgcagaggagctcattactaggatatgtgacgcagccacaattcactgtcttttggagcaagaactggcccatgctgtgaatgcctgctcccatgccctgaataaagccaacccaaggtgcccggagagtcttacaagagacactgccactgaaatagccatcaatgtgaaggcgctgtataatgaaacagaatctttgctagttggcagggttcctttgcagctggaatcgccacatgaagagcgagtatccaatgccttacactctgtggaggtggaattacagaaactgacagagattccttggctttattatatcttacacccaaatgaggatgaggaacctcctatggattgcaccaaaaggaacaacagaagcaccgtatttcgaatagtgccaaagtttaaaaaggaaaaggttcagaagcagaagacaagttcacagcctgttcagaaatggggcacagaggaagttgctgcttggctggatctgctcaatttgggagagtacaaagatatcttcatccgtcatgacatcagaggggctgaacttttgcatctggaaaggcgagatcttaaggatctggggataccgaaagtgggtcatgtgaagcgaattctccagggaattaaagagcttggaaggagcactccacagtcggaggtgtaatcatattggtgctatttcttggaagagaagttattgccacttaatacaaagtccttggaagcaagtggctgttcttgtagttttctgcatagataagtaagcaccactgaagcacctctgtggcttgatattttgctgtgggtgaaattttgatttgaggtattagaaaatatttttgtgccgaacaatacattccacaaagccattttctttttgtgcaaacctgacatgttcaaatatattcacaatggtaataaggtaggaggaatctgagacgattgcattgtctaaacagtggaattgcaaaatgtttactttccatagatctggtctgatggaatgttcctactgtgcaactgcataacaatatgtggttaaaacttcctaggtttcattacgggggggcattggccattttcttaaaatcataggttaggagactaaaatataaattaagttgtgatttgaatgtagattggtatcacctccaactcctagtgcttagtggtcaaatatgttgaaaacctttccaatactatgaatgaatgcaaatcttaatgcacgatgaa

SEQ ID NO: 707 - protein, 1220 aa, Homo Sapiens
MAGAGGQHHPPGAAGGAAAGAGAAVTSAAASAGPGEDSSDSEAEQEGPQKLIRKVSTSGQIRTKTSIKEGQLLKQTSSFQRWKKRYFKLRGRTLYYAKDSKSLIFDEVDLSDASVAEASTKNANNSFTIITPFRRLMLCAENRKEMEDWISSLKSVQTREPYEVAQFNVEHFSGMHNWYACSHARPTFCNVCRESLSGVTSHGLSCEVCKFKAHKRCAVRATNNCKWTTLASIGKDIIEDEDGVAMPHQWLEGNLPVSAKCAVCDKTCGSVLRLQDWKCLWCKTMVHTACKDLYHPICPLGQCKVSIIPPIALNSTDSDGFCRATFSFCVSPLLVFVNSKSGDNQGVKFLRRFKQLLNPAQVFDLMNGGPHLGLRLFQKFDNFRILVCGGDGSVGWVLSEIDKLNLNKQCQLGVLPLGTGNDLARVLGWGGSYDDDTQLPQILEKLERASTKMLDRWSIMTYELKLPPKASLLPGPPEASEEFYMTIYEDSVATHLTKILNSDEHAVVISSAKTLCETVKDFVAKVEKTYDKTLENAVVADAVASKCSVLNEKLEQLLQALHTDSQAAPVLPGLSPLIVEEDAVESSSEESLGESKEQLGDDVTKPSSQKAVKPREIMLRANSLKKAVRQVIEEAGKVMDDPTVHPCEPANQSSDYDSTETDESKEEAKDDGAKESITVKTAPRSPDARASYGHSQTDSVPGPAVAASKENLPVLNTRIICPGLRAGLAASIAGSSIINKMLLANIDPFGATPFIDPDLDSVDGYSEKCVMNNYFGIGLDAKISLEFNNKREEHPEKCRSRTKNLMWYGVLGTRELLQRSYKNLEQRVQLECDGQYIPLPSLQGIAVLNIPSYAGGTNFWGGTKEDDIFAAPSFDDKILEVVAIFDSMQMAVSRVIKLQHHRIAQCRTVKITIFGDEGVPVQVDGEAWVQPPGIIKIVHKNRAQMLTRDRAFESTLKSWEDKQKCDSGKPVLRTHLYIHHAIDLATEEVSQMQLCSQAAEELITRICDAATIHCLLEQELAHAVNACSHALNKANPRCPESLTRDTATEIAINVKALYNETESLLVGRVPLQLESPHEERVSNALHSVEVELQKLTEIPWLYYILHPNEDEEPPMDCTKRNNRSTVFRIVPKFKKEKVQKQKTSSQPVQKWGTEEVAAWLDLLNLGEYKDIFIRHDIRGAELLHLERRDLKDLGIPKVGHVKRILQGIKELGRSTPQSEV

SEQ ID NO: 708 - DNA, 2864 bp, Homo Sapiens
cctggcgaaagcaagacgtggaggttttaccaggggttagtagcttcctcttgctaactttttattgggacaaaaggcaagatggcaccattctgttctcagatatttgtctaaataaagcccttttaattttattttatttttgttgtgggattcttaagcagataagaagaaaagacaccttcctagtgagcagctgcccagctcctgctcagttttgcctcggggtagcacctccagccacagaaagcaagccggtaagtctctccaggtaggacttgctgcaacccagctgctggactgatctgaaacgggactttgcatactctccgaagtatggtgagttggtgctgacttcaaagttgcctggtgaaggaagataaggtggatcgcagagactaaggggagagggagaagccctgctcctcttctccccaccaaggcacaatgagcaacatctgtcagaggctctgggagtacctagaaccctatctcccctgtttgtccacggaggcagacaagtcaaccgtgattgaaaatccaggggccctttgctctccccagtcacagaggcatggccactactttgtggctttgtttgattaccaggctcggactgctgaggacttgagcttccgagcaggtgacaaacttcaagttctggacactttgcatgagggctggtggtttgccagacacttggagaaaagacgagatggctccagtcagcaactacaaggctatattccttctaactacgtggctgaggacagaagcctacaggcagagccgtggttctttggagcaatcggaagatcagatgcagagaaacaactattatattcagaaaacaagaccggttcctttctaatcagagaaagtgaaagccaaaaaggagaattctctctttcagttttagatggagcagttgtaaaacactacagaattaaaagactggatgaagggggattttttctcacgcgaagaagaatcttttcaacactgaacgaatttgtgagccactacaccaagacaagtgacggcctgtgtgtcaagctggggaaaccatgcttaaagatccaggtcccagctccatttgatttgtcgtataaaaccgtggaccaatgggagatagaccgcaactccatacagcttctgaagcgattgggatctggtcagtttggcgaagtatgggaaggtctgtggaacaataccactccagtagcagtgaaaacattaaaaccaggttcaatggatccaaatgacttcctgagggaggcacagataatgaagaacctaagacatccaaagcttatccagctttatgctgtttgcactttagaagatccaatttatattattacagagttgatgagacatggaagtctgcaagaatatctccaaaatgacactggatcaaaaatccatctgactcaacaggtagacatggcggcacaggttgcctctggaatggcctatctggagtctcggaactacattcacagagatctggctgccagaaatgtcctcgttggtgaacataatatctacaaagtagcagattttggacttgccagagtttttaaggtagataatgaagacatctatgaatctagacacgaaataaagctgccggtgaagtggactgcgcccgaagccattcgtagtaataaattcagcattaagtccgatgtatggtcatttggaatccttctttatgaaatcattacttatggcaaaatgccttacagtggtatgacaggtgcccaggtaatccagatgttggctcaaaactatagacttccgcaaccatccaactgtccacagcaattttacaacatcatgttggagtgctggaatgcagagcctaaggaacgacctacatttgagacactgcgttggaaacttgaagactattttgaaacagactcttcatattcagatgcaaataacttcataagatgaacactggagaagaatatcaaataataaagtagcaaaacaaattcaaataatccattccaaaatacaatgttatcaaccaactgcacaatcagtttatcctgacatattcaagtgataggataaagttggccatgtattatgaaaaagattatttgtgcattttattgactgggcaacactgcaggacagtcaaggtgatatataatttcctcactgcctggtaaaattaagcacactaaaccaagttatttttctttttaagagatacttacatttccatttattgtttgaaatgtcgatcaagagaatcaacagatgatagtccaatttttactcagtgactgttgtagcattttcctgtttactgattagagtggttattcattattcctcagattgctgaatcccatcaggctgttattatgaaggaatttgattgctttgctgcacagcaggacctgtgctttgagatttttttttctcttttaaaatatcctgtaactacaatgatggtaaagccatgttaaatgacttgattgtacttggagtaattgcacatttttttctatgcataaaaaaatgatgcagctgttgagaaaacgaagtctttttcattttgcagaaggaaatgatggaatttttctgtacttcagtatgtgtcaactgagagtcatatacattagttttaatctcttaatattgagaatcaggttgcaaaacggatgagttattatctatggaaatgtgagaaatgtctaatagcccataaagtctgagaaataggtatcaaaatagtttaggaaaatgagaggagaacagtaggattgctgtggcctagacttctgagtaattaataaagaaaaagaagtaccctttggcctacaaaaaaaaaaaaaaaa

SEQ ID NO: 709 - protein, 505 aa, Homo Sapiens
MSNICQRLWEYLEPYLPCLSTEADKSTVIENPGALCSPQSQRHGHYFVALFDYQARTAEDLSFRAGDKLQVLDTLHEGWWFARHLEKRRDGSSQQLQGYIPSNYVAEDRSLQAEPWFFGAIGRSDAEKQLLYSENKTGSFLIRESESQKGEFSLSVLDGAVVKHYRIKRLDEGGFFLTRRRIFSTLNEFVSHYTKTSDGLCVKLGKPCLKIQVPAPFDLSYKTVDQWEIDRNSIQLLKRLGSGQFGEVWEGLWNNTTPVAVKTLKPGSMDPNDFLREAQIMKNLRHPKLIQLYAVCTLEDPIYIITELMRHGSLQEYLQNDTGSKIHLTQQVDMAAQVASGMAYLESRNYIHRDLAARNVLVGEHNIYKVADFGLARVFKVDNEDIYESRHEIKLPVKWTAPEAIRSNKFSIKSDVWSFGILLYEIITYGKMPYSGMTGAQVIQMLAQNYRLPQPSNCPQQFYNIMLECWNAEPKERPTFETLRWKLEDYFETDSSYSDANNFIR

SEQ ID NO: 710 - DNA, 2937 bp, Homo Sapiens
atgggcacgcgtctgccgctcgtcctgcgccagctccgccgcccgccccagcccccgggccctccgcgccgcctccgtgtgccctgtcgcgctagcagcggcggcggcggaggcggcggcggtggccgggagggcctgcttggacagcggcggccgcaggatggccaggcccggagcagctgcagccccggcggccgaacgcccgcggcgcgggactccatcgtcagagaagtcattcagaattcaaaagaagttctaagtttattgcaagaaaaaaaccctgccttcaagccggttcttgcaattatccaggcaggtgacgacaacttgatgcaggaaatcaaccagaatttggctgaggaggctggtctgaacatcactcacatttgcctccctccagatagcagtgaagccgagattatagatgaaatcttaaagatcaatgaagataccagagtacatggccttgcccttcagatctctgagaacttgtttagcaacaaagtcctcaatgccttgaaaccagaaaaagatgtggatggagtaacagacataaacctggggaagctggtgcgaggggatgcccatgaatgttttgtttcacctgttgccaaagctgtaattgaacttcttgaaaaatcaggtgtcaacctagatggaaagaagattttggtagtgggggcccatgggtctttggaagctgctctacaatgcctgttccagagaaaagggtccatgacaatgagcatccagtggaaaacacgccagcttcaaagcaagcttcacgaggctgacattgtggtcctaggctcacctaagccagaagagattccccttacttggatacaaccaggaactactgttctcaactgctcccatgacttcctgtcagggaaggttgggtgtggctctccaagaatacattttggtggactcattgaggaagatgatgtgattctccttgctgcagctctgcgaattcagaacatggtcagtagtggaaggagatggcttcgtgaacagcagcacaggcggtggagacttcactgcttgaaacttcagcctctctcccctgtgccaagtgacattgagatttcaagaggacaaactccaaaagctgtggatgtccttgccaaggagattggattgcttgcagatgaaattgaaatctatggcaaaagcaaagccaaagtacgtttgtccgtgctagaaaggttaaaggatcaagcagatggaaaatacgtcttagttgctgggatcacacccacccctcttggagaagggaagagcacagtcaccatcgggcttgtgcaggctctgaccgcacacctgaatgtcaactcctttgcctgcttgaggcagccttcccaaggaccgacgtttggagtgaaaggaggagccgcgggtggtggatatgcccaggtcatccccatggaggagttcaaccttcacttgactggagacatccacgccatcaccgctgccaataacttgctggctgccgccatcgacacgaggattcttcatgaaaacacgcaaacagataaggctctgtataatcggctggttcctttagtgaatggtgtcagagaattttcagaaattcagcttgctcggctaaaaaaactgggaataaataagactgatccgagcacactgacagaagaggaagtgagtaaatttgcccgtctcgacatcgacccatctaccatcacgtggcagagagtattggatacaaatgaccgatttctacgaaaaataaccatcgggcagggaaacacagagaagggccattaccggcaggcgcagtttgacatcgcagtggccagcgagatcatggcggtgctggccctgacggacagcctcgcagacatgaaggcacggctgggaaggatggtggtggccagtgacaaaagcgggcagcctgtgacagcagatgatttgggggtgacaggtgctttgacagttttgatgaaagatgcaataaaaccaaacctgatgcagaccctggaagggacacctgtgttcgtgcatgcgggcccttttgctaacattgctcacggcaactcttcagtgttggctgataaaattgccctgaaactggttggtgaagaaggatttgtagtgaccgaagctggctttggtgctgacatcggaatggagaaattcttcaacatcaagtgccgagcttccggcttggtgcccaacgtggttgtgttagtggcaacggtgcgagctctgaagatgcatggaggcgggccaagtgtaacggctggtgttcctcttaagaaagaatatacagaggagaacatccagctggtggcagacggctgctgtaacctccagaagcaaattcagatcactcagctctttggggttcccgttgtggtggctctgaatgtcttcaagaccgacacccgcgctgagattgacttggtgtgtgagcttgcaaagcgggctggtgcctttgatgcagtcccctgctatcactggtccgttggtggaaaaggatcggtggacttggctcgggctgtgagagaggctgcgagtaaaagaagccgattccagttcctgtatgatgttcaggttccaattgtggacaagataaggaccattgctcaggctgtctatggagccaaagatattgaactctctcctgaggcacaagccaaaatagatcgttacactcaacagggttttggaaatttgcccatctgcatggcaaagacccacctttctctatctcaccaacctgacaaaaaaggtgtgccaagggacttcatcttacctatcagtgacgtccgggccagcataggcgctgggttcatttaccctttggtcggaacgatgagcaccatgccaggactgcccacccggccctgcttttatgacatagatcttgataccgaaacagaacaagttaaaggcttgttctaa

SEQ ID NO: 711 - protein, 978 aa, Homo Sapiens; identical to SEQ ID NO: 552

SEQ ID NO: 712 - DNA, 1848 bp, Homo Sapiens
cacgctgcgcccggcgccgcagggtgggcggcgaggcactcacgagggggacgctgagggcttccgcgcgggccacccgggtcaagcgcgctccgccgggaaacttctgcgggcgccgggctgaagctccgggcagggctgggaaggaaaggaaataccaaaatatttgcagactggatccaaatcaggagcccagatgaacttaaagaagcgagcatgggattcttagtttttcaagatccgtacacacgaagcctttaatcagcatcaactccagtgtccgttttctctggttttgtgaagactgcacaaaactctcatgatggagaaccaaaggacttagttacctgtttcagtgtcatctaaagtcaactgaaaagtgaagcaggcagtaatacagccatggaaagaaattcaagtttatggaagaacctaatagatgaacacccagtctgcacaacctggaagcaagaggccgaaggagccatttatcatcttgccagtattttatttgtagtaggtttcatgggtggcagtggattcttcgggctcctttatgtcttcagtttgctggggttgggttttctctgttctgctgtctgggcttgggtagatgtctgtgcagctgacatattttcctggaattttgtactgtttgtcatctgcttcatgcaatttgttcatattgcatatcaagttcgcagcataacctttgcccgagaattccaagtgttgtacagctcccttttccagcccctggggatctctttgcctgtcttcagaacgattgctttgagctctgaagtggttactttggaaaaggaacactgttatgccatgcaggggaaaacttccattgataaactctccttgcttgtttcaggaaggatcagagtgacagttgatggcgaatttctgcattacattttcccccttcagttcctggattctcctgagtgggattcactgagacccacagaggaaggcatttttcaggtaaccctcactgcagaaactgattgtcgatatgtgtcttggaggagaaagaaattatatctgctctttgctcagcatcgctacatctcccgccttttttcagtgctaattggcagtgacattgcagataaactctatgccttgaatgacagggtatatataggaaaaagatatcactatgatattcggctacccaacttctatcaaatgtcaactccagaaatacgcagatcacccctgacacaacattttcagaattccagacgatactgtgataaatgacatcaaagtctgaaatttataagtataaaaaaagactctctcttcatcattccccagtgaaatagcaaaatacaaaaaaagagctccctaatgtttttataaatcaaattcagaagcgagatgccattgccaactgttttattcctttcaacaactgcattgtgaataaactttacaaatttttcttgtatttctcattgttataattggggagggggtggataactatgggcagtttgcccttttctgcatcaaaactgggagaatgaaattccactttctcaattcttttctcacatttactcaaatgcattgtcttgccctatagactcaggagttgcttctcaagaaagagccagcaagtattctcagcctgagggtgggttgctactgtccacataggcatttccggaattcacttttttgctacaacctccagtgaaagcaattatttattttaaatgtgcagttacttgatgcgactaaaaagtagaataaatgcaagagataataatatgtgaatcttgaagcctattttattgctacaaataaaataacatttaaaaagaa

SEQ ID NO: 713 - protein, 291 aa, Homo Sapiens
MERNSSLWKNLIDEHPVCTTWKQEAEGAIYHLASILFVVGFMGGSGFFGLLYVFSLLGLGFLCSAVWAWVDVCAADIFSWNFVLFVICFMQFVHIAYQVRSITFAREFQVLYSSLFQPLGISLPVFRTIALSSEVVTLEKEHCYAMQGKTSIDKLSLLVSGRIRVTVDGEFLHYIFPLQFLDSPEWDSLRPTEEGIFQVTLTAETDCRYVSWRRKKLYLLFAQHRYISRLFSVLIGSDIADKLYALNDRVYIGKRYHYDIRLPNFYQMSTPEIRRSPLTQHFQNSRRYCDK

SEQ ID NO: 714 - DNA, 1485 bp, Homo Sapiens
tcagccaattagagctccagttgtcactcctacccacactgggcctgggggtgaagggaagtgtttattaggggtacatgtgaagccgtccagaagtgtcagagtctttgtagctttgaaagtcacctaggttatttgggcatgctctcctgagtcctctgctagttaagctctctgaaaagaaggtggcagacccggtttgctgatcgccccagggatcaggaggctgatcccaaagttgtcagatggagagtaaatacaaggagatactcttgctaacaggcctggataacatcactgatgaggaactggataggtttaagttctttctttcagacgagtttaatattgccacaggcaaactacatactgcaaacagaatacaagtagctaccttgatgattcaaaatgctggggcggtgtctgcagtgatgaagaccattcgtatttttcagaagttgaattatatgcttttggcaaaacgtcttcaggaggagaaggagaaagttgataagcaatacaaatcggtaacaaaaccaaagccactaagtcaagctgaaatgagtcctgctgcatctgcagccatcagaaatgatgtcgcaaagcaacgtgctgcaccaaaagtctctcctcatgttaagcctgaacagaaacagatggtggcccagcaggaatctatcagagaagggtttcagaagcgctgtttgccagttatggtactgaaagcaaagaagcccttcacgtttgagacccaagaaggcaagcaggagatgtttcatgctacagtggctacagaaaaggaattcttctttgtaaaagtttttaatacactgctgaaagataaattcattccaaagagaataattataatagcaagatattatcggcacagtggtttcttagaggtaaatagcgcctcacgtgtgttagatgctgaatctgaccaaaaggttaatgtcccgctgaacattatcagaaaagctggtgaaaccccgaagatcaacacgcttcaaactcagccccttggaacaattgtgaatggtttgtttgtagtccagaaggtaacagaaaagaagaaaaacatattatttgacctaagtgacaacactgggaaaatggaagtactgggggttagaaacgaggacacaatgaaatgtaaggaaggagataaggttcgacttacattcttcacactgtcaaaaaatggagaaaaactacagctgacatctggagttcatagcaccataaaggttattaaggccaaaaaaaaaacatagagaagtaaaaaggaccaattcaagccaactggtctaagcagcatttaattgaagaatatgtgatacagcctcttcaatcagattgtaagttacctgaaagctgcagttcacaggctcctctctccaccaaattaggatagaataattgctggataaacaaattcagaatatcaacagatgatcacaataaacatctgtttctcattcc

SEQ ID NO: 715 - protein, 343 aa, Homo Sapiens
MESKYKEILLLTGLDNITDEELDRFKFFLSDEFNIATGKLHTANRIQVATLMIQNAGAVSAVMKTIRIFQKLNYMLLAKRLQEEKEKVDKQYKSVTKPKPLSQAEMSPAASAAIRNDVAKQRAAPKVSPHVKPEQKQMVAQQESIREGFQKRCLPVMVLKAKKPFTFETQEGKQEMFHATVATEKEFFFVKVFNTLLKDKFIPKRIIIIARYYRHSGFLEVNSASRVLDAESDQKVNVPLNIIRKAGETPKINTLQTQPLGTIVNGLFVVQKVTEKKKNILFDLSDNTGKMEVLGVRNEDTMKCKEGDKVRLTFFTLSKNGEKLQLTSGVHSTIKVIKAKKKT

SEQ ID NO: 716 - DNA, 2548 bp, Homo Sapiens
agcatggagagaaaatttatgtccttgcaaccatccatctccgtatcagaaatggaaccaaatggcaccttcagcaataacaacagcaggaactgcacaattgaaaacttcaagagagaatttttcccaattgtatatctgataatatttttctggggagtcttgggaaatgggttgtccatatatgttttcctgcagccttataagaagtccacatctgtgaacgttttcatgctaaatctggccatttcagatctcctgttcataagcacgcttcccttcagggctgactattatcttagaggctccaattggatatttggagacctggcctgcaggattatgtcttattccttgtatgtcaacatgtacagcagtatttatttcctgaccgtgctgagtgttgtgcgtttcctggcaatggttcacccctttcggcttctgcatgtcaccagcatcaggagtgcctggatcctctgtgggatcatatggatccttatcatggcttcctcaataatgctcctggacagtggctctgagcagaacggcagtgtcacatcatgcttagagctgaatctctataaaattgctaagctgcagaccatgaactatattgccttggtggtgggctgcctgctgccatttttcacactcagcatctgttatctgctgatcattcgggttctgttaaaagtggaggtcccagaatcggggctgcgggtttctcacaggaaggcactgaccaccatcatcatcaccttgatcatcttcttcttgtgtttcctgccctatcacacactgaggaccgtccacttgacgacatggaaagtgggtttatgcaaagacagactgcataaagctttggttatcacactggccttggcagcagccaatgcctgcttcaatcctctgctctattactttgctggggagaattttaaggacagactaaagtctgcactcagaaaaggccatccacagaaggcaaagacaaagtgtgttttccctgttagtgtgtggttgagaaaggaaacaagagtataaggagctcttagatgagacctgttcttgtatccttgtgtccatcttcattcactcatagtctccaaatgactttgtatttacatcactcccaacaaatgttgattcttaatatttagttgaccattacttttgttaataagacctacttcaaaaattttattcagtgtattttcagttgttgagtcttaatgagggatacaggaggaaaaatccctactagagtcctgtgggctgaaatatcagactgggaaaaaatgcaaagcacattggatcctacttttcttcagatattgaaccagatctctggcccatcaggctttctaaattcttcaaaagagccacaacttccccagcttctccagctcccctgtcctcttcaatcccttgagatatagccaactaacgacgctactggaagccccagagcagaaaagaagcacatcctaagattcagggaaagactaactgtgaaaaggaaggctgtcctataacaaagcagcatcaagtcccaagtaaggacagtgagagaaaagggggagaaggattggagcaaaagagaactggcaataagtaggggaaggaagaatttcattttgcattgggagagaggttctaacacactgaaggcaaccctatttctactgtttctctcttgccagggtattaggaaggacaggaaaagtaggaggaggatctggggcattgccctaggaaatgaaagaattgtgtatagaatggaagggggatcatcaaggacatgtatctcaaattttctttgagatgcaggttagttgaccttgctgcagttctccttcccattaattcattgggatggaagccaaaaataaaagaggtgcctctgaggattagggttgagcactcaagggaaagatggagtagagggcaaatagcaaaagttgttgcactcctgaaattctattaacatttccgcagaagatgagtagggagatgctgccttcccttttgagatagtgtagaaaaacactagatagtgtgagaggttcctttctgtccactgaaacaaggctaaggatactaccaactactatcaccatgaccattgtactgacaacaattgaatgcagtctccctgcagggcagattatgccaggcactttacatttgttgatcccatttgacattcacaccaaagctctgagttccattttacagctgaagaaattgaagcttagagaaattaagaagcttgtttaagtttacacagctagtaagagttttaaaaatctctgtgcagaagtgttggctgggtgctctccccaccactacccttgtaaacttccaggaagattggttgaaagtctgaataaaagctgtcctttcctaccaatttcctccccctcctcactctcacaagaaaaccaaaagtttctcttcagagttgttgactcatagtacagtaaagggtggaggtgatatggcattctgaaagtagggagggactaagtcagtcatcatactaaac

SEQ ID NO: 717 - protein, 346 aa, Homo Sapiens
MERKFMSLQPSISVSEMEPNGTFSNNNSRNCTIENFKREFFPIVYLIIFFWGVLGNGLSIYVFLQPYKKSTSVNVFMLNLAISDLLFISTLPFRADYYLRGSNWIFGDLACRIMSYSLYVNMYSSIYFLTVLSVVRFLAMVHPFRLLHVTSIRSAWILCGIIWILIMASSIMLLDSGSEQNGSVTSCLELNLYKIAKLQTMNYIALVVGCLLPFFTLSICYLLIIRVLLKVEVPESGLRVSHRKALTTIIITLIIFFLCFLPYHTLRTVHLTTWKVGLCKDRLHKALVITLALAAANACFNPLLYYFAGENFKDRLKSALRKGHPQKAKTKCVFPVSVWLRKETRV

SEQ ID NO: 718 - DNA, 5478 bp, Homo Sapiens
agtttggtctggagcagctgaaaccggtttgagcgtggctgcttcctgccgctcgacgccgcggcaggccgcctggggggagcgctggcgaggcacggacggcgggcgcccggtacctctgcccgcggtcctcgctctcgggcggggcggcggcgacgcggacctgcggactagcgaacccggagcacgacatcataaaataaatccatcagaatgacaccttctcaggttgcctttgaaataagaggaactcttttaccaggagaagtttttgcgatatgtggaagctgtgatgctttgggaaactggaatcctcaaaatgctgtggctcttcttccagagaatgacacaggtgaaagcatgctatggaaagcaaccattgtactcagtagaggagtatcagttcagtatcgctacttcaaagggtactttttagaaccaaagactatcggtggtccatgtcaagtgatagttcacaagtgggagactcatctacaaccacgatcaataacccctttagaaagcgaaattattattgacgatggacaatttggaatccacaatggtgttgaaactctggattctggatggctgacatgtcagactgaaataagattacgtttgcattattctgaaaaacctcctgtgtcaataaccaagaaaaaattaaaaaaatctagatttagggtgaagctgacactagaaggcctggaggaagatgacgatgatagggtatctcccactgtactccacaaaatgtccaatagcttggagatatccttaataagcgacaatgagttcaagtgcaggcattcacagccggagtgtggttatggcttgcagcctgatcgttggacagagtacagcatacagacgatggaaccagataacctggaactaatctttgattttttcgaagaagatctcagtgagcacgtagttcagggtgatgcccttcctggacatgtgggtacagcttgtctcttatcatccaccattgctgagagtggaaagagtgctggaattcttactcttcccatcatgagcagaaattcccggaaaacaataggcaaagtgagagttgactatataattattaagccattaccaggatacagttgtgacatgaaatcttcattttccaagtattggaagccaagaataccattggatgttggccatcgaggtgcaggaaactctacaacaactgcccagctggctaaagttcaagaaaatactattgcttctttaagaaatgctgctagtcatggtgcagcctttgtagaatttgacgtacacctttcaaaggactttgtgcccgtggtatatcatgatcttacctgttgtttgactatgaaaaagaaatttgatgctgatccagttgaattatttgaaattccagtaaaagaattaacatttgaccaactccagttgttaaagctcactcatgtgactgcactgaaatctaaggatcggaaagaatctgtggttcaggaggaaaattccttttcagaaaatcagccatttccttctcttaagatggttttagagtctttgccagaagatgtagggtttaacattgaaataaaatggatctgccagcaaagggatggaatgtgggatggtaacttatcaacatattttgacatgaatctgtttttggatataattttaaaaactgttttagaaaattctgggaagaggagaatagtgttttcttcatttgatgcagatatttgcacaatggttcggcaaaagcagaacaaatatccgatactatttttaactcaaggaaaatctgagatttatcctgaactcatggacctcagatctcggacaacccccattgcaatgagctttgcacagtttgaaaatctactggggataaatgtacatactgaagacttgctcagaaacccatcctatattcaagaggcaaaagctaagggactagtcatattctgctggggtgatgataccaatgatcctgaaaacagaaggaaattgaaggaacttggagttaatggtctaatttatgataggatatatgattggatgcctgaacaaccaaatatattccaagtggagcaattggaacgcctgaagcaggaattgccagagcttaagagctgtttgtgtcccactgttagccgctttgttccctcatctttgtgtggggagtctgatatccatgtggatgccaacggcattgataacgtggagaatgcttagtttttattgcacagaggtcattttgggggcgtgcaccgctgttctgggtattcatttttcatcactgagcattgttgatctatgccttttgggcttctcagttcaatgaagcaataatgaagtatttaactctttcactacagttcttgcaagtatgctatttaaattacttggccaggtataattgccagtcagtctctttatagtgagaaaatttattggttagtaatataaatattttaaactaaatatataaatctataatgttaaacatatgttcattaaaagcatagcactttgaaattaactatataaatagctcatatttacacttacagcttttcatttgatcaggtctgaaatctttagcacttaaggaaaatgactatgcataattatacctgaccatgaaaaaaataagtacctcaaatgcatgcatttgcactggtgattccaactgcacaaatctttgtgccatcttgtatataggtattttttacatgggttgacatgcacacaacaccattttcattcagtatgaaccttgaggctgctgccatttttccacttaaccaaaccagcctgaaggtgaacctcgaaacttgtttcataaatctttcaaaagttgttttacatcaatgttaaaatttcaaaatgctgcagggtaatttaatgtataaaatattagtaagaaaaagtatgtattgcatacttagtagaatagatcacaacatacaaattcaattcagtgcatgctttaggtgttaagcatgagattgtacatgtttactgttaggtccttgcatctgtggtgctaggtgagtatgagaagatgtcaaggactggacgtattttgttgcctaaaaaaaaaaggctgtttgtaggcgttttaaatatgcttattttgtgtgtctctcactacctattacacactgttgctttgtgggtttgttttgtatgtgcgtgtgttatacagtagttaaatttccatgcagaaaaataaatgtcctgaattttcatattagtattctttattgtatatcatgcatgtaatttatttagaaatgtaggtcttactaaatgtatatgcatgtatttcagattatactaggatttcttggattagaagcagattgtgttaactgtaacttaaagaatgaatgttaaataaaatgatacagatttattttcttcattacaaaatgaaatttcaagaaggtgttacttttgtagaatggttttataatatgacaagaaattttaatatagtgtctaccctaaagggatggcttatttgcatctaccttttactgcatgtttttcacaaggcagtttattcatatattgacatattttggtagtagctgagaacctaagacttgaaattatacattgtgtagtattttttaagctaagcaatgcaattttggtcagatcttatttgtgtgaagataggctctgaaatcctatggtattgcgtttgtaacgttgatattaatgcaaaatagtttaggaaatggagtcttctgcaagggttctgtatacttttcccacattgtatgagattttccaaaattttggtgtgaattgggcacttttggaaaactcctgaaaaagaattagtttccttcatctgcagacctttgtccaatacggttaccatttctttatagtaactcgattagccatatatgtttgtttctagtcctgctcctttgctcctctcctatgccttcccagtgctggctccattttgaagactcaaggacagaggggaagcagatcataaagagaaaaaggagacagaagaaaggatgaaggaaggaggtcatggggagtgtggcttctgagcagtttagttgctggggagagcagacagtcactgcctacaatacagacagaaccttcctgctcactttctgtcctatctcttcctgaccttatgaaccagtgttagtagatgattaaaacatgacaagcaatggctccttattttcacaggactaagtccgggccttcgtatcactagctgttgccttttacaccctgcttcagccaccctgtccctgtcattggccctggacttcctctctgtgcccgtgtgtcctctgcctgggagccctctcctcccatagtcactttctctctgccaaactcatttcttcttgtgcccaagacctctctcctgagcccttgtggaaacttcaggaaggatgaatccgtctttgtgctccacggctcgtaccttgatcaggctgtgcatcacagtaattctgttctaggtaggcagagttgatctttgtctcatctgccaggctgcaggctcttcaagggcagggaccttgtcatagtcatttttattttcacagtgcttggaacatggtggaaaatgaatgttggaattattggagtaatataatttgtatcaaatgtccttttgaattaagagatttagttatgtttactaagaatgtaaactttgaattggtttgcattttaacaattaggatggtttattgatgtgaattttgaaatgtagaggtataatgttaaattattttatactttatggaaatcaagtgaaatgtttgaaaaaatgccgccattatcctctggtattttctactctctggaattatgtgctgtaaatgatcggctgtaaatgtgaggcacaccacccacccctgtgtggaaagtgttgtggcgcttcctgccacccacccacctctctgccgttgctccttgtgacacttgtctgtcgtctcccatccaaactccaagcttacagctacctcagtactgctttgcttgtctgaaacacctcctttgccttccttcagtgtcccgctcaggtgcagcctcctccctaaagctcatctcagcttttgatctgaatgatgatggaaacatgcagacagcctctcagtcttactatttaatgttgtagctgggaaaaaacccagagaggttaactgatatactgggttgggactaggatgtgggttttgtgactctgaatcccatgttctcaaactacgctgccttccgaagtctggcatttgttagctcatgcttccttgtagtccagcttcttatgtgcctgttatattctccagtaagattgtaagccccttaagggcagggacgtctttgcatctctagcactgctatagtgttctatccttagttatgaactagataaataaatggtggtggcaacaatcctaaaaaaaaaaaaaaaaaaaa

SEQ ID NO: 719 - protein, 672 aa, Homo Sapiens
MTPSQVAFEIRGTLLPGEVFAICGSCDALGNWNPQNAVALLPENDTGESMLWKATIVLSRGVSVQYRYFKGYFLEPKTIGGPCQVIVHKWETHLQPRSITPLESEIIIDDGQFGIHNGVETLDSGWLTCQTEIRLRLHYSEKPPVSITKKKLKKSRFRVKLTLEGLEEDDDDRVSPTVLHKMSNSLEISLISDNEFKCRHSQPECGYGLQPDRWTEYSIQTMEPDNLELIFDFFEEDLSEHVVQGDALPGHVGTACLLSSTIAESGKSAGILTLPIMSRNSRKTIGKVRVDYIIIKPLPGYSCDMKSSFSKYWKPRIPLDVGHRGAGNSTTTAQLAKVQENTIASLRNAASHGAAFVEFDVHLSKDFVPVVYHDLTCCLTMKKKFDADPVELFEIPVKELTFDQLQLLKLTHVTALKSKDRKESVVQEENSFSENQPFPSLKMVLESLPEDVGFNIEIKWICQQRDGMWDGNLSTYFDMNLFLDIILKTVLENSGKRRIVFSSFDADICTMVRQKQNKYPILFLTQGKSEIYPELMDLRSRTTPIAMSFAQFENLLGINVHTEDLLRNPSYIQEAKAKGLVIFCWGDDTNDPENRRKLKELGVNGLIYDRIYDWMPEQPNIFQVEQLERLKQELPELKSCLCPTVSRFVPSSLCGESDIHVDANGIDNVENA

SEQ ID NO: 720 - DNA, 6050 bp, Homo Sapiens
atccatggcacggagcggcggcggcggcggcagcaggagcccggcgcgatccgctaggtcccagcccagcgcccagcgagcaggcgacgcggaggggccgggcctccagtgtcccgagggccgggcgctgagactccggccgcgcagctgggagctgcccgcgctgcgctgacagccgcgccgacgtcctccccgccggggcgctcgcaggacatgcccccggggcgcggcggcggggaccccggggctcgcctccgcccagggcccccctccacgccctcgggagccccgggcccccgctgagcactcctcccgcacgcctgggtccctccggccggcgcgcagcccggccccagcgctgtgggtccccgcggggcgatgggttgatgggcgccgggggacgcaggatgcggggggcgcccgcgcgcctgctgctgccgctgctgccgtggctcctgctgctcctggcgcccgaggctcggggcgcgcccggctgcccgctatccatccgcagctgcaagtgctcgggggagcggcccaaggggctgagcggcggcgtccctggcccggctcggcggagggtggtgtgcagcggcggggacctcccggagcctcccgagcccggccttctgcctaacggcaccgttaccctgctcttgagcaataacaagatcacggggctccgcaatggctccttcctgggactgtcactgctggagaagctggacctgaggaacaacatcatcagcacagtgcagccgggcgccttcctgggcctgggggagctgaagcgtttagatctctccaacaaccggattggctgtctcacctccgagaccttccagggcctccccaggcttctccgactaaacatatctggaaacatcttctccagtctgcaacctggggtctttgatgagctgccagcccttaaggttgtggacttgggcaccgagttcctgacctgtgactgccacctgcgctggctgctgccctgggcccagaatcgctccctgcagctgtcggaacacacgctctgtgcttaccccagtgccctgcatgctcaggccctgggcagcctccaggaggcccagctctgctgcgagggggccctggagctgcacacacaccacctcatcccgtccctacgccaagtggtgttccagggggatcggctgcccttccagtgctctgccagctacctgggcaacgacacccgcatccgctggtaccacaaccgagcccctgtggagggtgatgagcaggcgggcatcctcctggccgagagcctcatccacgactgcaccttcatcaccagtgagctgacgctgtctcacatcggcgtgtgggcctcaggcgagtgggagtgcaccgtgtccatggcccaaggcaacgccagcaagaaggtggagatcgtggtgctggagacctctgcctcctactgccccgccgagcgtgttgccaacaaccgcggggacttcaggtggccccgaactctggctggcatcacagcctaccagtcctgcctgcagtatcccttcacctcagtgcccctgggcgggggtgccccgggcacccgagcctcccgccggtgtgaccgtgccggccgctgggagccaggggactactcccactgtctctacaccaacgacatcaccagggtgctgtacaccttcgtgctgatgcccatcaatgcctccaatgcgctgaccctggctcaccagctgcgcgtgtacacagccgaggccgctagcttttcagacatgatggatgtagtctatgtggctcagatgatccagaaatttttgggttatgtcgaccagatcaaagagctggtagaggtgatggtggacatggccagcaacctgatgctggtggacgagcacctgctgtggctggcccagcgcgaggacaaggcctgcagccgcatcgtgggtgccctggagcgcattgggggggccgccctcagcccccatgcccagcacatctcagtgaatgcgaggaacgtggcattggaggcctacctcatcaagccgcacagctacgtgggcctgacctgcacagccttccagaggagggagggaggggtgccgggcacacggccaggaagccctggccagaaccccccacctgagcccgagcccccagctgaccagcagctccgcttccgctgcaccaccgggaggcccaatgtttctctgtcgtccttccacatcaagaacagcgtggccctggcctccatccagctgcccccgagtctattctcatcccttccggctgccctggctcccccggtgcccccagactgcaccctgcaactgctcgtcttccgaaatggccgcctcttccacagccacagcaacacctcccgccctggagctgctgggcctggcaagaggcgtggcgtggccacccccgtcatcttcgcaggaaccagtggctgtggcgtgggaaacctgacagagccagtggccgtttcgctgcggcactgggctgagggagccgaacctgtggccgcttggtggagccaggaggggcccggggaggctgggggctggacctcggagggctgccagctccgctccagccagcccaatgtcagcgccctgcactgccagcacttgggcaatgtggccgtgctcatggagctgagcgcctttcccagggaggtggggggcgccggggcagggctgcaccccgtggtatacccctgcacggccttgctgctgctctgcctcttcgccaccatcatcacctacatcctcaaccacagctccatccgtgtgtcccggaaaggctggcacatgctgctgaacttgtgcttccacatagccatgacctctgctgtctttgcggggggcatcacactcaccaactaccagatggtctgccaggcggtgggcatcaccctgcactactcctccctatccacgctgctctggatgggcgtgaaggcgcgagtgctccataaggagctcacctggagggcaccccctccgcaagaaggggaccccgctctgcctactcccagtcctatgctccggttctatttgatcgctggagggattccactcattatctgtggcatcacagctgcagtcaacatccacaactaccgggaccacagcccctactgctggctggtgtggcgtccaagccttggcgccttctacatccctgtggctttgattctgctcatcacctggatctatttcctgtgcgccgggctacgcttacggggtcctctggcacagaaccccaaggcgggcaacagcagggcctccctggaggcaggggaggagctgaggggttccaccaggctcaggggcagcggccccctcctgagtgactcaggttcccttcttgctactgggagcgcgcgagtggggacgcccgggcccccggaggatggtgacagcctctattctccgggagtccagctaggggcgctggtgaccacgcacttcctgtacttggccatgtgggcctgcggggctctggcagtgtcccagcgctggctgccccgggtggtgtgcagctgcttgtacggggtggcagcctccgccctgggcctcttcgtcttcactcaccactgtgccaggcggagggacgtgagagcctcgtggcgcgcctgctgcccccctgcctctcccgcggccccccatgccccgccccgggccctgcccgccgccgcagaggacggttccccggtgttcggggagggccccccctccctcaagtcctccccaagcggcagcagcggccatccgctggctctgggcccctgcaagctcaccaacctgcagctggcccagagtcaggtgtgcgaggcgggggcggcggccggcggggaaggagagccggagccggcgggcacccggggaaacctcgcccaccgccaccccaacaacgtgcaccacgggcgtcgggcgcacaagagccgggccaagggacaccgcgcgggggaggcctgcggcaagaaccggctcaaggccctgcgcgggggcgcggcgggggcgctggagctgctgtccagcgagagcggcagtctgcacaacagccccaccgacagctacctgggcagcagccgcaacagcccgggcgccggcctgcagctggaaggcgagcccatgctcacgccgtccgagggcagcgacaccagcgccgcgccgctttctgaggcgggccgggcaggccagcgccgcagcgccagccgcgacagtctcaagggcggcggcgcgctggagaaggagagccatcgccgctcgtacccgctcaacgccgccagcctaaacggcgcccccaaggggggcaagtacgacgacgtcaccctgatgggcgcggaggtagccagcggcggctgcatgaagaccggactctggaagagcgaaactaccgtctaaggtggggcgggcgacgcggtagacgggctggccacgcggctcgttcccccgctcctcggggccctccaaggtgtctccgtagtcagcaggttggaggcagaggagccgatggctggaggaagcccacaggcggatgttccccacttgcctagagggcatccctctggggtagcgacagacaatcccagaaacacgcataatacatttccgtccagcccggggcagtctgactgtcggtgccctcccaggaacggggaaggcctccgtctgtgtgaaagggcacagcacatcccaggtgcaccctccccaagtactcccaccccgcctactgtccatgcggcctcactgggggccatcagcctcaccagcaaagcagagatgagagcgtgggaactgtgttctttcctccctgccctctactgatttcagcccagcccctgcctagatcctaggtcccttttcctcccgagtttggctggcacgagagctagcccagcacatgaagcaggtgatgttaagtcacaaggtgctgcttttcagatccactatgcaagaggggagggtggggccacgtgaaaggcagctctagacatcaaccagtcctgggggaggggagtgggaaccgggcacaactaggaacaatgccaccattcccacaggagtggtacttaaaccagacagcagggttcagaggtggcacaccgggacaaagctgaggccctgcacctcaacagctgactgccaggtgcctgtgggtgaactgaggggagtagagggagagggcaggtggaactggggcagaatctagtcatgccctaaagctagtcctgtaaacaatggtgccccagaaagctgcaggtggtgtttggagaagcagttacttttcagttacaagacccatctccctagtctcagccttacaacaccacgggactaaggaagagcacttccttgcctccgtaaggccagaggaagaaccatcccaatcatttgatctccagctccacagtagagagaaacctacaaaatgtcaaaccagcttcccgactcccaggagctcaagccaagcccagaggcagtggctggggtccctgcaggtcatgaggggcctatgcctttactccttttaaacaccagcacccgtcttttccccaacctaaaaccaaccaccagcatttcactacaggaccaaatggaaaccgagggaaccctgggtcttgggaagaacaacaggaaaccaaggtctgacctagggttccctcccagtcttcacatcactctggcctcatcaccaaggtgacagaggacacaggggagggggaaaacccacacacactccttggaatgggtcctgttatttatgcttgctgcacagacatattagaagaaaaaaaaaagctttgtattattcttccacatatgctggctgctgtttacacaccctgccaatgccttagcactggagagctttttgcaatatgctggggaaaggggagggagggaatgaaagtgccaaagaaaacatgtttttaagaactcgggttttatacaatagaatgttttctagcagatgcctcttgttttaatatattaaaattttgcaaagccctttgagctactgccttagtctaaaaaaaaaaaaaaaaa

SEQ ID NO: 721 - protein, 1338 aa, Homo Sapiens
MGAGGRRMRGAPARLLLPLLPWLLLLLAPEARGAPGCPLSIRSCKCSGERPKGLSGGVPGPARRRVVCSGGDLPEPPEPGLLPNGTVTLLLSNNKITGLRNGSFLGLSLLEKLDLRNNIISTVQPGAFLGLGELKRLDLSNNRIGCLTSETFQGLPRLLRLNISGNIFSSLQPGVFDELPALKVVDLGTEFLTCDCHLRWLLPWAQNRSLQLSEHTLCAYPSALHAQALGSLQEAQLCCEGALELHTHHLIPSLRQVVFQGDRLPFQCSASYLGNDTRIRWYHNRAPVEGDEQAGILLAESLIHDCTFITSELTLSHIGVWASGEWECTVSMAQGNASKKVEIVVLETSASYCPAERVANNRGDFRWPRTLAGITAYQSCLQYPFTSVPLGGGAPGTRASRRCDRAGRWEPGDYSHCLYTNDITRVLYTFVLMPINASNALTLAHQLRVYTAEAASFSDMMDVVYVAQMIQKFLGYVDQIKELVEVMVDMASNLMLVDEHLLWLAQREDKACSRIVGALERIGGAALSPHAQHISVNARNVALEAYLIKPHSYVGLTCTAFQRREGGVPGTRPGSPGQNPPPEPEPPADQQLRFRCTTGRPNVSLSSFHIKNSVALASIQLPPSLFSSLPAALAPPVPPDCTLQLLVFRNGRLFHSHSNTSRPGAAGPGKRRGVATPVIFAGTSGCGVGNLTEPVAVSLRHWAEGAEPVAAWWSQEGPGEAGGWTSEGCQLRSSQPNVSALHCQHLGNVAVLMELSAFPREVGGAGAGLHPVVYPCTALLLLCLFATIITYILNHSSIRVSRKGWHMLLNLCFHIAMTSAVFAGGITLTNYQMVCQAVGITLHYSSLSTLLWMGVKARVLHKELTWRAPPPQEGDPALPTPSPMLRFYLIAGGIPLIICGITAAVNIHNYRDHSPYCWLVWRPSLGAFYIPVALILLITWIYFLCAGLRLRGPLAQNPKAGNSRASLEAGEELRGSTRLRGSGPLLSDSGSLLATGSARVGTPGPPEDGDSLYSPGVQLGALVTTHFLYLAMWACGALAVSQRWLPRVVCSCLYGVAASALGLFVFTHHCARRRDVRASWRACCPPASPAAPHAPPRALPAAAEDGSPVFGEGPPSLKSSPSGSSGHPLALGPCKLTNLQLAQSQVCEAGAAAGGEGEPEPAGTRGNLAHRHPNNVHHGRRAHKSRAKGHRAGEACGKNRLKALRGGAAGALELLSSESGSLHNSPTDSYLGSSRNSPGAGLQLEGEPMLTPSEGSDTSAAPLSEAGRAGQRRSASRDSLKGGGALEKESHRRSYPLNAASLNGAPKGGKYDDVTLMGAEVASGGCMKTGLWKSETTV

SEQ ID NO: 722 - DNA, 1405 bp, Homo Sapiens
cggaggaccagggaccggctccggaccgcgcagttagcgccgcctggcctgggccggacccggtcagggttctcaagctgtcgtccctatggggctgtgttttccttgtcccggggagtccgcgcctcccacgccggacctggaagagaaaagagcaaagcttgcagaggctgcagagagaagacaaaaagaggctgcatctcggggaattttagatgttcaatctgtgcaagaaaagagaaagaaaaaggaaaaaatagaaaaacaaattgctacatccgggcccccaccagaaggtggacttaggtggacagtttcataaagcataacatgagtagaagaatctactgccaataactgtttattatctgcaatcaagtgggcttcatcaatttaatttcttctctttgagtaaatgaagattcagactttgtaatattattgcccttaagtgcaatgctaaaaaaacgttgattttcaagcttagagaatggctagacttttcattaaatactgattttcctacatttgctcttctgcagttagtgggtgatttgctatttttcttagtagttaaaaaatggaactaaatagtgaatatacatacactgcatgtaaacattctgcatatacctctaagattaaaattcgcagttgtcttttcatcctttataaaatgatctaactacttatatttgtgctgcatcgcgttacatctgtttttatttcactatgaagatgtttgattaaacttatggacttagtgcctttaaactgatcatcagggagaatcttgaaaaaatcatttgaagggctgatgtgaaggagcactgtaaatttttataacttagtaatgagtattcttaggcagatgtaaaattttttccaatttatttttatttatgtagcttataaaattaacataccctgttttactttatgataaaggattttttgtttgctgaatttaaaattatatattagtgataccatcagagggcagtgatgttctattgtatattaaattcagctctgtaaggatctttgtagtaattgaatgagttaaactaataatctggatgggttataatgagtagtaatatatttgtccatatttcataagtagtgttaatcttgtgtacttattagagaacgatcataagatttatacagatgtgaaactgcgaaggcaagtatgaatgtatgaaaaaaacatgtaggtactgtacttacaaaaggtctacttcagatataaaaatattaggtaattctatacaatgcatagtcataaaccttaacatttttgttcattagaaacatgaattttatagcattttttgtttctcctatataatacactgaaataaaagaatttgtgttagctattaaaaaaaaaaaaaaaaaa

SEQ ID NO: 723 - protein, 77 aa, Homo Sapiens
MGLCFPCPGESAPPTPDLEEKRAKLAEAAERRQKEAASRGILDVQSVQEKRKKKEKIEKQIATSGPPPEGGLRWTVS

SEQ ID NO: 724 - DNA, 4318 bp, Homo Sapiens
agcagcgctcatggcgaagaggcttaaggccacaaaaccgtgggacagcaggaggaagagaagccaggtatctccactccagctgccctgcctcagactcctcagtttcgcacgtgaggatcgtcttgcaggcactgactggagatggaatcctaaagcataggtgaagcggaaatcctccttcagggagagcccactgaggaagccagcggctagcacgaggcaggacaggatacctccctcttcgcccacggcggcctctctgtcatagtagccaccgttctgccactcatgcagctttctaagacacctctcggttccccagcgctttcagtggggcggccggccattcccgagggttgcaagaggaggcccggggtgctgagccagcctcgctgcccccgcgtagaaagccggcccgccggcgagagccagcctaaggcgcggacaaccaacgaggtgtcaggctcggcaggggattgcttctgtctggggcccggccgaggttgcgttcgtgcctcgcgcgcacacgctccgcgttcactcagccaatccggtgctactcgcgcgcccaggagcgatccgcggtcctactcaggctgggccggctccttcccgctcccaatactcagcacccgagctctcactcctcccctcactctccacgagttccacgcctaggggtgtagctccgcccttgtccccgagtccgcccccgcaacctccagagcgtgtgctatcctttcctctcagtcctgccatctagctgccttgggtctcgcgctccgcagagcgttccgacactctccggcctcgttctgccgcctccgcgcgctctccccgtgcggccaccgcgccccccaagcttgcctccttcttgccggacttggggccgcgcgccctgactccttcccctcccgcggacccgcgcactcccggcgcggcctctcccccacgcaggccaccgtgcactctgtggcctccccctccttccccgctctcctcgcgcttctctggctccctagctgtcgcgctctcctcggcgagcgcgctcccggcccgcgcgctccgggctccggtttctcccggctcctgtcagtgcggtgactgcgctgggaaacatggcgaccgagggaatgatccttactaaccacgaccatcaaatccgtgtcggagtccttacagtgagtgatagttgcttcaggaatcttgcagaagaccgcagtgggataaatctcaaagatctcgtacaagatccttctttgttgggtgggactatatcagcatacaagatagtaccagatgaaatagaagaaatcaaggaaaccctgatagattggtgtgatgaaaaggaacttaatttgatattaacaactggaggaacaggatttgcaccacgagatgtcactccagaggccacaaaagaagtaatagaacgggaagcaccagggatggccctggcaatgctgatgggatcacttaatgttacacctctgggcatgctctctaggcctgtatgtggaatcagagggaaaacgctcataattaacctgccaggtagcaagaaaggatctcaggaatgctttcaattcatactgccagctctacctcatgccattgaccttttacgtgatgccattgtaaaagtaaaggaggtgcatgatgaacttgaagatttgccttccccacctccccctctttcccctcctcctactaccagcccccataaacagacagaagacaaaggagttcaatgtgaggaagaggaagaagagaagaaagacagtggtgttgcttcaacagaagatagttcctcatcacatataactgcagcagccattgctgccaagaagcatccattctacaccagtcctgctgttgtcatggcacacggtgaacagcccatccctggtctcatcaattattcccatcattcaacagatgaacggattccagactccatcatttctcgtggtgttcaggtgctcccacgagacacagcctccctcagcactactccttcagaatcgcctcgtgctcaggctacatctcgcctctctacagcttcctgcccaacaccaaaagtccagtccaggtgcagcagcaaggagaacattctcagagccagtcacagtgctgtcgatatcaccaaggtggctagaagacatcgcatgtctccttttcctctgacatctatggacaaagcctttatcacagtcctggagatgactccggtgcttgggacagaaatcatcaattaccgagatggaatggggcgagtccttgctcaagatgtatatgcaaaagacaatttaccccccttcccagcatcagtaaaagatggctatgctgtccgagctgctgatggcccaggagatcgtttcatcattggggaatcccaagctggtgaacagccaactcagacagtaatgccaggacaagtcatgcgggttacaacaggtgctccaataccctgcggtgctgatgcagtagtacaagtggaagataccgaacttatcagggaatcagatgatggcactgaagaacttgaagtgcgaattctggtgcaagctcggccaggccaagatatcagacccatcggccatgacattaaaagaggggaatgtgttttggccaaaggaacccacatgggcccctcagagattggtcttctggcaactgtaggtgtcacagaggttgaagttaataagtttccagtggttgcagtcatgtcaacagggaatgagctgctaaatcctgaagatgacctcttaccagggaagattcgagacagcaatcgttcaactcttctagcaacaattcaggaacatggttaccccacgatcaacttgggtattgtaggagacaacccagatgacttactcaatgccttgaatgagggtatcagtcgtgctgatgtcatcatcacatcagggggtgtatccatgggggaaaaggactatctcaagcaggtgctggacattgatcttcatgctcagatccattttggcagggtttttatgaaaccaggcttgccaacaacatttgcaactttggatattgatggtgtaagaaaaataatctttgcactacctgggaatcctgtatcggctgtggtcacctgcaatctctttgttgtgcctgcactgaggaaaatgcagggcatcttggatcctcggccaaccatcatcaaagcaaggttatcatgtgatgtaaaacttgatcctcgtccagaataccatcggtgtatactaacttggcatcaccaagaaccactaccttgggcacagagtacaggtaatcaaatgagcagccgtctgatgagcatgcgcagtgccaatggattgttgatgctacctccaaagacagaacagtacgtggagctccacaaaggcgaggtggtggatgtcatggtcattggacggctatgatggtcaccagcaggagaaagctttgatgcatgtccacatatcattgactgtatcctgtaatatgcaacggcacagctagttttcccgatttggataaaagttgatctgtatagtcaacatcttgaactatatttcaaatgaatttaaatatcttttaaagaaaaaaacacctaaaaataaatcttaacagaaaattctgttctgattatatcaaggcaaatttttcctttcttgcaaattgctttgtgtgttcaatgctaggtctgatagcgatagcttttagtagacagcggtaggtgcctgcagaacttgtgtttttctcatctttaaaatacaactacttatgctcttaaatcaaggctgtctgcttatttatactagcgtaggcaacacttggatttcccttcttagtatgcttcataactgctttacagagagcttttgcttgttctttctcatgtatctcgtgtttatgtgcacagtgccaaaagaagactgactgggtggaggctctgccttgcctcaagaaccatcccctgcagagcatccagggaggtttctcgccccaatagcctcacggcacagtactcttgggcagtaactggacaccttttatttgaagaaacaaactgaagaaaaaatgcttccttaagtgctgacagcctttttaaccaatacatttaaaattgtacagaacaaaaaaataaaatcaaagactgatcttgtacagatattagtgttaccagcattcatgtggaaatcaagagcaaagacaaaataatgttaaacaattctgtaccataacattttctgtaatgatactgaaacttaatgaataaaaaaattccttgatcattatttaaaaatgtaaaaaaaaaaaaaaaaaa

SEQ ID NO: 725 - protein, 769 aa, Homo Sapiens
MATEGMILTNHDHQIRVGVLTVSDSCFRNLAEDRSGINLKDLVQDPSLLGGTISAYKIVPDEIEEIKETLIDWCDEKELNLILTTGGTGFAPRDVTPEATKEVIEREAPGMALAMLMGSLNVTPLGMLSRPVCGIRGKTLIINLPGSKKGSQECFQFILPALPHAIDLLRDAIVKVKEVHDELEDLPSPPPPLSPPPTTSPHKQTEDKGVQCEEEEEEKKDSGVASTEDSSSSHITAAAIAAKKHPFYTSPAVVMAHGEQPIPGLINYSHHSTDERIPDSIISRGVQVLPRDTASLSTTPSESPRAQATSRLSTASCPTPKVQSRCSSKENILRASHSAVDITKVARRHRMSPFPLTSMDKAFITVLEMTPVLGTEIINYRDGMGRVLAQDVYAKDNLPPFPASVKDGYAVRAADGPGDRFIIGESQAGEQPTQTVMPGQVMRVTTGAPIPCGADAVVQVEDTELIRESDDGTEELEVRILVQARPGQDIRPIGHDIKRGECVLAKGTHMGPSEIGLLATVGVTEVEVNKFPVVAVMSTGNELLNPEDDLLPGKIRDSNRSTLLATIQEHGYPTINLGIVGDNPDDLLNALNEGISRADVIITSGGVSMGEKDYLKQVLDIDLHAQIHFGRVFMKPGLPTTFATLDIDGVRKIIFALPGNPVSAVVTCNLFVVPALRKMQGILDPRPTIIKARLSCDVKLDPRPEYHRCILTWHHQEPLPWAQSTGNQMSSRLMSMRSANGLLMLPPKTEQYVELHKGEVVDVMVIGRL

SEQ ID NO: 726 - DNA, 3080 bp, Homo Sapiens
gggtgcctcatattgccagacaagagctcagacctgaggagagtgactagcttctctgtgtcccaggtggccaccttccactgtggaagctcatggactccattgggtcttcagggttgcggcagggggaagaaaccctgagttgctctgaggagggcttgcccgggccctcagacagctcagagctggtgcaggagtgcctgcagcagttcaaggtgacaagggcacagctacagcagatccaagccagcctcttgggttccatggagcaggcgctgaggggacaggccagccctgcccctgcggtccggatgctgcctacatacgtggggtccaccccacatggcactgagcaaggagacttcgtggtgctggagctgggggccacaggggcctcactgcgtgttttgtgggtgactctaactggcattgaggggcatagggtggagcccagaagccaggagtttgtgatcccccaagaggtgatgctgggtgctggccagcagctctttgactttgctgcccactgcctgtctgagttcctggatgcgcagcctgtgaacaaacagggtctgcagcttggcttcagcttctctttcccttgtcaccagacgggcttggacaggagcaccctcatttcctggaccaaaggttttaggtgcagtggtgtggaaggccaggatgtggtccagctgctgagagatgccattcggaggcagggggcctacaacatcgacgtggttgctgtggtgaacgacacagtgggcaccatgatgggctgtgagccgggggtcaggccgtgtgaggttgggctagttgtagacacgggcaccaacgcgtgttacatggaggaggcacggcatgtggcagtgctggacgaagaccggggccgcgtctgcgtcagcgtcgagtggggctccttcagcgatgatggggcgctgggaccagtgctgaccaccttcgaccataccctggaccatgagtccctgaatcctggtgctcagaggtttgagaagatgatcggaggcctgtacctgggtgagctggtgcggctggtgctggctcacttggcccggtgtggggtcctctttggtggctgcacctcccctgccctgctgagccaaggcagcatcctcctggaacacgtggctgagatggaggacccctctactggggcagcccgtgtccatgctatcctgcaggacttgggcctgagccctggggcttcggatgttgagcttgtgcagcacgtctgtgcggccgtgtgcacgcgggctgcccagctctgtgctgccgccctggccgctgttctctcctgcctccagcacagccgggagcaacaaacactccaggttgctgtggccaccggaggccgagtgtgtgagcggcaccccaggttctgcagcgtcctgcaggggacagtgatgctcctggccccggaatgcgatgtctccttaatcccctctgtggatggtggtggccggggagtggcgatggtgactgccgtggctgcccgtctggctgcccaccggcgcctgctggaggagaccctggccccattccggttgaaccatgatcaactggctgcggttcaggcacagatgcggaaggccatggccaaggggctccgaggggaggcctcctcccttcgcatgctgcccactttcgtccgggccacccctgacggcagcgagcgaggggatttcctggccctggacctcgggggcacgaacttccgtgtcctcctggtacgtgtgaccacaggcgtgcagatcaccagcgagatctactccattcccgagactgtggcccagggttctgggcagcagctctttgaccacatcgtggactgcatcgtggacttccagcagaagcagggcctgagcgggcagagcctcccactgggttttaccttctccttcccatgtaggcagcttggcctagaccagggcatcctcctgaactggaccaagggtttcaaggcatcagactgcgagggccaagatgtcgtgagtctgttgcgggaagccatcactcgcagacaggcagtggagctgaatgtggttgccattgtcaatgacacggtggggaccatgatgtcctgtggctatgaggacccccgttgcgagataggcctcattgtcggaaccggcaccaatgcctgctacatggaggagctccggaatgtggcgggcgtgcctggggactcaggccgcatgtgcatcaacatggagtggggcgcctttggggacgatggctctctggccatgctcagcacccgctttgatgcaagtgtggaccaggcgtccatcaaccccggcaagcagaggtttgaaaagatgatcagcggcatgtacctgggggagatcgtccgccacatccttttacatttaaccagccttggcgttctcttccggggccagcagatccagcgccttcagaccagggacatcttcaagaccaagttcctctctgagatcgaaagtgacagcctggccctgcggcaggtccgagccatcctagaggatctggggctacccctgacctcagatgacgccctgatggtgctagaggtgtgccaggctgtgtcccagagggctgcccagctctgtggggcgggtgtagctgccgtggtggagaagatccgggagaaccggggcctggaagagctggcagtgtctgtgggggtggatggaacgctctacaagctgcacccgcgcttctccagcctggtggcggccacagtgcgggagctggcccctcgctgtgtggtcacgttcctgcagtcagaggatgggtccggcaaaggtgcggccctggtcaccgctgttgcctgccgccttgcgcagttgactcgtgtctgaggaaacctccaggctgaggaggtctccgccgcagccttgctggagccgggtcggggtctgcctgtttcccagccaggcccagccacccaggactcctgggacatcccatgtgtgacccctctgcggccatttggccttgctccctggctttccctgagagaagtagcactcaggttagcaatatatatatataatttatttacaaaaaaaaaaaaa

SEQ ID NO: 727 - protein, 923 aa, Homo Sapiens
MDSIGSSGLRQGEETLSCSEEGLPGPSDSSELVQECLQQFKVTRAQLQQIQASLLGSMEQALRGQASPAPAVRMLPTYVGSTPHGTEQGDFVVLELGATGASLRVLWVTLTGIEGHRVEPRSQEFVIPQEVMLGAGQQLFDFAAHCLSEFLDAQPVNKQGLQLGFSFSFPCHQTGLDRSTLISWTKGFRCSGVEGQDVVQLLRDAIRRQGAYNIDVVAVVNDTVGTMMGCEPGVRPCEVGLVVDTGTNACYMEEARHVAVLDEDRGRVCVSVEWGSFSDDGALGPVLTTFDHTLDHESLNPGAQRFEKMIGGLYLGELVRLVLAHLARCGVLFGGCTSPALLSQGSILLEHVAEMEDPSTGAARVHAILQDLGLSPGASDVELVQHVCAAVCTRAAQLCAAALAAVLSCLQHSREQQTLQVAVATGGRVCERHPRFCSVLQGTVMLLAPECDVSLIPSVDGGGRGVAMVTAVAARLAAHRRLLEETLAPFRLNHDQLAAVQAQMRKAMAKGLRGEASSLRMLPTFVRATPDGSERGDFLALDLGGTNFRVLLVRVTTGVQITSEIYSIPETVAQGSGQQLFDHIVDCIVDFQQKQGLSGQSLPLGFTFSFPCRQLGLDQGILLNWTKGFKASDCEGQDVVSLLREAITRRQAVELNVVAIVNDTVGTMMSCGYEDPRCEIGLIVGTGTNACYMEELRNVAGVPGDSGRMCINMEWGAFGDDGSLAMLSTRFDASVDQASINPGKQRFEKMISGMYLGEIVRHILLHLTSLGVLFRGQQIQRLQTRDIFKTKFLSEIESDSLALRQVRAILEDLGLPLTSDDALMVLEVCQAVSQRAAQLCGAGVAAVVEKIRENRGLEELAVSVGVDGTLYKLHPRFSSLVAATVRELAPRCVVTFLQSEDGSGKGAALVTAVACRLAQLTRV

SEQ ID NO: 728 - DNA, 921 bp, Homo Sapiens
aatgatgaaagagtgcaagctctcacttccccttcctgtacagggcaggttgtgcagctggaggcagagcagtcctctctggggagcctgaagcaaacatggatcaagaaactgtaggcaatgttgtcctgttggccatcgtcaccctcatcagcgtggtccagaatggattctttgcccataaagtggagcacgaaagcaggacccagaatgggaggagcttccagaggaccggaacacttgcctttgagcgggtctacactgccaaccagaactgtgtagatgcgtaccccactttcctcgctgtgctctggtctgcggggctactttgcagccaagttcctgctgcgtttgctggactgatgtacttgtttgtgaggcaaaagtactttgtcggttacctaggagagagaacgcagagcacccctggctacatatttgggaaacgcatcatactcttcctgttcctcatgtccgttgctggcatattcaactattacctcatcttctttttcggaagtgactttgaaaactacataaagacgatctccaccaccatctcccctctacttctcattccctaactctctgctgaatatggggttggtgttctcatctaatcaatacctacaagtcatcataattcagctcttgagagcattctgctcttctttagatggctgtaaatctattggccatctgggcttcacagcttgagttaaccttgcttttccgggaacaaaatgatgtcatgtcagctccgccccttgaacatgaccgtggccccaaatttgctattcccatgcattttgtttgtttcttcacttatcctgttctctgaagatgttttgtgaccaggtttgtgttttcttaaaataaaatgcagagacatgttttaagctgataaaaaaaaaaaaaaaa

SEQ ID NO: 729 - protein, 161 aa, Homo Sapiens
MDQETVGNVVLLAIVTLISVVQNGFFAHKVEHESRTQNGRSFQRTGTLAFERVYTANQNCVDAYPTFLAVLWSAGLLCSQVPAAFAGLMYLFVRQKYFVGYLGERTQSTPGYIFGKRIILFLFLMSVAGIFNYYLIFFFGSDFENYIKTISTTISPLLLIP

SEQ ID NO: 730 - DNA, 1409 bp, Homo Sapiens
cgacttcctctttccagtgcatttaaggcgcagcctggaagtgccagggagcactggaggccacccagtcatgggggacaccttcatccgtcacatcgccctgctgggctttgagaagcgcttcgtacccagccagcactatgtgtacatgttcctggtgaaatggcaggacctgtcggagaaggtggtctaccggcgcttcaccgagatctacgagttccataaaaccttaaaagaaatgttccctattgaggcaggggcgatcaatccagagaacaggatcatcccccacctcccagctcccaagtggtttgacgggcagcgggccgccgagaaccgccagggcacacttaccgagtactgcggcacgctcatgagcctgcccaccaagatctcccgctgtccccacctcctcgacttcttcaaggtgcgccctgatgacctcaagctccccacggacaaccagacaaaaaagccagagacatacttgatgcccaaagatggcaagagtaccgcgacagacatcaccggccccatcatcctgcagacgtaccgcgccattgccaactacgagaagacctcgggctccgagatggctctgtccacgggggacgtggtggaggtcgtagagaagagcgagagcggttggtggttctgtcagatgaaagcaaagcgaggctggatcccagcgtccttcctcgagcccctggacagtcctgacgagacggaagaccctgagcccaactatgcaggtgagccatacgtcgccatcaaggcctacactgctgtggagggggacgaggtgtccctgctcgagggtgaagctgttgaggtcattcacaagctcctggacggctggtgggtcatcaggaaagacgacgtcacaggctacttcccgtccatgtacctgcaaaagtcagggcaagacgtgtcccaggcccaacgccagatcaagcggggggcgccgccccgcaggtcgtccatccgcaacgcgcacagcatccaccagcggtcgcggaagcgcctcagccaggacgcctatcgccgcaacagcgtccgttttctgcagcagcgacgccgccaggcgcggccgggaccgcagagccccgggagcccgctcgaggaggagcggcagacgcagcgctctaaaccgcagccggcggtgcccccgcggccgagcgccgacctcatcctgaaccgctgcagcgagagcaccaagcggaagctggcgtctgccgtctgaggctggagcgcagtccccagctagcgtctcggcccttgccgccccgtgcctgtacatacgtgttctatagagcctggcgtctggacgccgagggcagccccgacccctgtccagcgcggctcccgccaccctcaataaatgttgcttggagtggaaaaaaaaaaaa

SEQ ID NO: 731 - protein, 390 aa, Homo Sapiens
MGDTFIRHIALLGFEKRFVPSQHYVYMFLVKWQDLSEKVVYRRFTEIYEFHKTLKEMFPIEAGAINPENRIIPHLPAPKWFDGQRAAENRQGTLTEYCGTLMSLPTKISRCPHLLDFFKVRPDDLKLPTDNQTKKPETYLMPKDGKSTATDITGPIILQTYRAIANYEKTSGSEMALSTGDVVEVVEKSESGWWFCQMKAKRGWIPASFLEPLDSPDETEDPEPNYAGEPYVAIKAYTAVEGDEVSLLEGEAVEVIHKLLDGWWVIRKDDVTGYFPSMYLQKSGQDVSQAQRQIKRGAPPRRSSIRNAHSIHQRSRKRLSQDAYRRNSVRFLQQRRRQARPGPQSPGSPLEEERQTQRSKPQPAVPPRPSADLILNRCSESTKRKLASAV

SEQ ID NO: 732 - DNA, 933 bp, Homo Sapiens
ggctgtgcgctctggggcacctcatgcagacgggagtagggaggctgttttttgcgcgtgcatatggcggtggcgggtggggggaagggggagatcctgctgcactggccgcccaagttggggggcgagctcggtggtgacgcgcggccctcacgtgacccagagctgcagagcgacgcagccttcggtgcagtcgtcactcgcgtctggctaccagctccccgctgccctgagctcggcgggctggcattcggcccggggaaaagcggagcaggtctgcgaggctaagtgtctccgcggcgcacctcgcggcgagaatccggaggagaaggagactgcaaggataggcccaggaaaacgaagagatggagcagcctatgcagaatggagaggaagaccgccctttgggaggaggtgaaggccaccagcctgcaggaaatcgacggggacaggctcgccgacttgcccctaattttcgatgggccatacccaataggcagatcaatgatgggatgggtggagatggagatgatatggaaatattcatggaggagatgagagaaatcagaagaaaacttagggagctgcagttgaggaattgtctgcgtatccttatgggggagctctctaatcaccatgaccatcatgatgaattttgccttatgccttgactcctgccatttatcatgagattaatactgtgattcccgctgttttctttttccttgcattttcctaatatgcctttactgatccgtttgctgtgaaccctatgttatttccatgtgtcaagtgggtcttgtgttgccagcttctatttgaagattgcctttgcactcagtgtaagtttctgtcagcagtagtttcacccatttgcatggaaaaatttaaagctaataaagcaatttaaaaagcaaaaaaaaaaaaaaaaaa

SEQ ID NO: 733 - protein, 101 aa, Homo Sapiens
MEQPMQNGEEDRPLGGGEGHQPAGNRRGQARRLAPNFRWAIPNRQINDGMGGDGDDMEIFMEEMREIRRKLRELQLRNCLRILMGELSNHHDHHDEFCLMP

SEQ ID NO: 734 - DNA, 5248 bp, Homo Sapiens
gcgtgcaaccctagaagggaaaaggacgggaagagattgagccgcggctgggagacagcgagccagagtctgggtgtttgtgcgagagccacggcgggggctggggcgagtggccggcatggctgaaggctgcgctctgcaaccttgaagagccgctgcattgagaggccagggacagggagaccggtgcgatggcagagcgcggcccccgccgctgcgccgggccggcccggctggcctgagccgccggaggagcggggctgcctctgcgcgtccatggagcagcgggaagggcgaaactccggagcgccgcgtccctgcgccgctgcggcggactgctgaaggggccgagcccgcgcggaccgccgaggaagagacccccgctccagcccgcaggccggctgcccgggggcggcgggggacatcggagggcagcggagcgagcagcgccgcgggagaggccggcgcgggaggcggccgcagcaatgccgggcccgctagggctgctctgcttcctcgccctggggctgctcggctcggccgggcccagcggcgcggcgccgcctctctgcgcggcgccctgcagctgcgacggcgaccgtcgggtggactgctccgggaaggggctgacggccgtgcccgaggggctcagcgccttcacccaagcgctggatatcagtatgaacaacattactcagttgccagaagatgcatttaagaactttccttttctagaagagctacaattggcgggcaacgacctttcttttatccacccaaaggccttgtctgggttgaaagaactcaaagttctaacgctccagaataatcagttgaaaacagtacccagtgaagccattcgagggctgagtgctttgcagtctttgcgtttagatgccaaccatattacctcagtccccgaggacagttttgaaggacttgttcagttacggcatctgtggctggatgacaacagcttgacggaggtgcctgtgcaccccctcagcaatctgcccaccctacaggcgctgaccctggctctcaacaagatctcaagcatccctgactttgcatttaccaacctttcaagcctggtagttctgcatcttcataacaataaaattagaagcctgagtcaacactgttttgatggactagataacctggagaccttagacttgaattataataacttgggggaatttcctcaggctattaaagcccttcctagccttaaagagctaggatttcatagtaattctatttctgttatccctgatggagcatttgatggtaatccactcttaagaactatacatttgtatgataatcctctgtcttttgtggggaactcagcatttcacaatttatctgatcttcattccctagtcattcgtggtgcaagcatggtgcagcagttccccaatcttacaggaactgtccacctggaaagtctgactttgacaggtacaaagataagcagcatacctaataatttgtgtcaagaacaaaagatgcttaggactttggacttgtcttacaataatataagagaccttccaagttttaatggttgccatgctctggaagaaatttctttacagcgtaatcaaatctaccaaataaaggaaggcacctttcaaggcctgatatctctaaggattctagatctgagtagaaacctgatacatgaaattcacagtagagcttttgccacacttgggccaataactaacctagatgtaagtttcaatgaattaacttcctttcctacggaaggcctgaatgggctaaatcaactgaaacttgtgggcaacttcaagctgaaagaagccttagcagcaaaagactttgttaacctcaggtctttatcagtaccatatgcttatcagtgctgtgcattttggggttgtgactcttatgcaaatttaaacacagaagataacagcctccaggaccacagtgtggcacaggagaaaggtactgctgatgcagcaaatgtcacaagcactcttgaaaatgaagaacatagtcaaataattatccattgtacaccttcaacaggtgcttttaagccctgtgaatatttactgggaagctggatgattcgtcttactgtgtggttcattttcttggttgcattatttttcaacctgcttgttattttaacaacatttgcatcttgtacatcactgccttcgtccaaattgtttataggcttgatttctgtgtctaacttattcatgggaatctatactggcatcctaacttttcttgatgctgtgtcctggggcagattcgctgaatttggcatttggtgggaaactggcagtggctgcaaagtagctgggtttcttgcagttttctcctcagaaagtgccatatttttattaatgctagcaactgtcgaaagaagcttatctgcaaaagatataatgaaaaatgggaagagcaatcatctcaaacagttccgggttgctgcccttttggctttcctaggtgctacagtagcaggctgttttccccttttccatagaggggaatattctgcatcacccctttgtttgccatttcctacaggtgaaacgccatcattaggattcactgtaacgttagtgctattaaactcactagcatttttattaatggccgttatctacactaagctatactgcaacttggaaaaagaggacctctcagaaaactcacaatctagcatgattaagcatgtcgcttggctaatcttcaccaattgcatctttttctgccctgtggcgtttttttcatttgcaccattgatcactgcaatctctatcagccccgaaataatgaagtctgttactctgatattttttccattgcctgcttgcctgaatccagtcctgtatgttttcttcaacccaaagtttaaagaagactggaagttactgaagcgacgtgttaccaagaaaagtggatcagtttcagtttccatcagtagccaaggtggttgtctggaacaggatttctactacgactgtggcatgtactcacatttgcagggcaacctgactgtttgcgactgctgcgaatcgtttcttttaacaaagccagtatcatgcaaacacttgataaaatcacacagctgtcctgcattggcagtggcttcttgccaaagacctgagggctactggtccgactgtggcacacagtcggcccactctgattatgcagatgaagaagattcctttgtctcagacagttctgaccaggtgcaggcctgtggacgagcctgcttctaccagagtagaggattccctttggtgcgctatgcttacaatctaccaagagttaaagactgaactactgtgtgtgtaaccgtttcccccgtcaaccaaaatcagtgtttatagagtgaaccctattctcatctttcatctgggaagcacttctgtaatcactgcctggtgtcacttagaagaaggagaggtggcagtttatttctcaaaccagtcattttcaaagaacaggtgcctaaattataaattggtgaaaaatgcaatgtccaagcaatgtatgatctgtttgaaacaaatatatgacttgaaaaggatcttaggtgtagtagagcaatataatgttagttttttctgatccataagaagcaaatttatacctatttgtgtattaagcacaagataaagaacagctgttaatattttttaaaaatctattttaaaatgtgattttctataactgaagaaaatatcttgctaattttacctaatgtttcatccttaatctcaggacaacttactgcagggccaaaaaagggactgtcccagctagaactgtgagagtatacataggcattactttattatgttttcacttgccatccttgacataagagaactataaattttgtttaagcaatttataaatctaaaacctgaagatgtttttaaaacaatattaacagctgttaggttaaaaaaatagctggacatttgttttcagtcattatacattgctttggtccaatcagtaattttttcttaagtgttttgtgattacactactagaaaaaaagtaaaaggctaattgctgtgtgggtttagtcgatttggctaaactactaactaatgtgggggtttaatagtatctgagggatttggtggcttcatgtaatgttctcattaatgaatacttcctaatatcgttggctctactaatattttccaatttgctgggatgtcacctagcaatagcttggattatatagaaagtaaactgtggtcaatacttgcatttaattagacgaaacggggagtaattatgacacgaagtacttatgtttatttcttagtgagctggattatcttgaacctgtgctattaaatggaaatttccatacatcttccccatactattttttataaaagagcctattcaatagctcagaggttgaactctggttaaacaagataatatgttattaataaaaatagaagaagaaagaataaagcttagtcctgtgtctttaaaaattaaaaattttacttgattcccatctatgggctttagacctattactgggtggagtcttaaagttataattgttcaatatgttttttgaacagtgtgctaaatcaatagcaaacccactgccatattagttattctgaatatactaaaaaaatccagctagattgcagtttaataattaaactgtacatactgtgcatataatgaatttttatcttatgtaaattatttttagaacacaagttgggaaatgtggcttctgttcatttcgtttaattaaagctacctcctaaactatagtggctgccagtagcagactgttaaattgtggtttatatactttttgcattgtaaatagtctttgttgtacattgtcagtgtaataaaaacagaatctttgtatatcaaaatcatgtagtttgtataaaatgtgggaaggatttatttacagtgtgttgtaattttgtaaggccaactatttacaagttttaaaaattgctatcatgtatatttacacatctgataaatattaaatcataacttggtaagaaactcctaattaaaaggttttttccaaaattcaggttattgaaaacttttcattttattcatttaaaaactagaataacagatatataaaagtgttaatctttgtgctatatggtatgaaatacaatattgtactcagtgttttgaattattaaagtttctagaaagcaaa

SEQ ID NO: 735 - protein, 951 aa, Homo Sapiens
MPGPLGLLCFLALGLLGSAGPSGAAPPLCAAPCSCDGDRRVDCSGKGLTAVPEGLSAFTQALDISMNNITQLPEDAFKNFPFLEELQLAGNDLSFIHPKALSGLKELKVLTLQNNQLKTVPSEAIRGLSALQSLRLDANHITSVPEDSFEGLVQLRHLWLDDNSLTEVPVHPLSNLPTLQALTLALNKISSIPDFAFTNLSSLVVLHLHNNKIRSLSQHCFDGLDNLETLDLNYNNLGEFPQAIKALPSLKELGFHSNSISVIPDGAFDGNPLLRTIHLYDNPLSFVGNSAFHNLSDLHSLVIRGASMVQQFPNLTGTVHLESLTLTGTKISSIPNNLCQEQKMLRTLDLSYNNIRDLPSFNGCHALEEISLQRNQIYQIKEGTFQGLISLRILDLSRNLIHEIHSRAFATLGPITNLDVSFNELTSFPTEGLNGLNQLKLVGNFKLKEALAAKDFVNLRSLSVPYAYQCCAFWGCDSYANLNTEDNSLQDHSVAQEKGTADAANVTSTLENEEHSQIIIHCTPSTGAFKPCEYLLGSWMIRLTVWFIFLVALFFNLLVILTTFASCTSLPSSKLFIGLISVSNLFMGIYTGILTFLDAVSWGRFAEFGIWWETGSGCKVAGFLAVFSSESAIFLLMLATVERSLSAKDIMKNGKSNHLKQFRVAALLAFLGATVAGCFPLFHRGEYSASPLCLPFPTGETPSLGFTVTLVLLNSLAFLLMAVIYTKLYCNLEKEDLSENSQSSMIKHVAWLIFTNCIFFCPVAFFSFAPLITAISISPEIMKSVTLIFFPLPACLNPVLYVFFNPKFKEDWKLLKRRVTKKSGSVSVSISSQGGCLEQDFYYDCGMYSHLQGNLTVCDCCESFLLTKPVSCKHLIKSHSCPALAVASCQRPEGYWSDCGTQSAHSDYADEEDSFVSDSSDQVQACGRACFYQSRGFPLVRYAYNLPRVKD

SEQ ID NO: 736 - DNA, 4307 bp, Homo Sapiens
ggccatttttcttcctggtgtttgaatgactcataaaatgagtttggagtggtctgaagcctctgcctccttccttgaatgctttctaagaggggctgccatgcaagaatatatgctgattttcccatacggcgcctcatctcccagagatcttccttggagaccctggaagatattgaggagaacgcccctctccggagatgtcgaactctctcaggttcacccagaccaaagaattttaagaagattcattttatcaagaacatgcggcaacacgataccaggaatggcagaatagtccttatcagtggcagaagatccttctgtagtatattttcagtgctgccgtatcgcgacagtacccaagtcggggacttgaagttggacggaggaagacaatcaactggtgcagtgagtttgaaagagatcattggtctggaaggtgtggagctgggtgctgatgggaagactgtttcctatacccaatttctgttacccacaaatgcctttggagcccggagaaataccatagactccacctcctctttctcccagttccgtaacctgagccaccgcagcctctccataggccgggcaagcggcacccaggggagcctcgacacaggtagtgacctgggagactttatggactatgacccaaatctcttggatgacccccagtggccttgtggcaaacacaaacgcgttctgatcttcccttcctacatgacaacagtgattgactacgtgaagccctcggatctcaagaaggacatgaacgagaccttcaaggagaagtttcctcacattaagctgacactcagcaaaattaggagtctgaaacgagagatgcggaagcttgcgcaggaggactgtggccttgaggagcccacggtggccatggccttcgtctactttgaaaagctcgccctcaaggggaaactcaacaaacagaaccggaagctgtgtgctggggcatgtgtgctgttagcagccaaaattggaagtgacctcaaaaaacacgaagtcaagcatttaattgacaaactggaagagaagttccggctgaacaggcgagaactgattgcctttgaattcccggtgttagtggccttggaattcgccctccacttgcccgagcacgaagtcatgccccactacagacggctggtccagagttcctagcactggccccgaggacagccaagggccatttcttctcagcttggtggagcagcacttacttactactggaaatgaaaaaaagtagaactcagaataccagacttttcttcctctcgacatagtttggggagaagcagtactagaaactttccaaggagtcttgggtgtgtagccaagaggagccatgagctatggactcctcaagcacgggaagaggaggtgtgtgctgagaacagagaggccctgccctctgtccactagcgagaatccctagctgccccagcccagtctttctccccggcattcacaaactttgcaagcgtggtccagggccttctccagatctgttccaacttggagtgtgaagggcttgagcatacgggggaagagagtctgcagaagttgggggaaaacttttaaaagataccctcattgtgtcaaagagtgtgccaatctatttttgtatcagcattggaagtgcactttcccctggggcgtgtgggtgtgtgaatgtgcaagtgtctgagagatactgcatcagccctagacccccagagccagtcccgccctttacagagcagcccttagcctggggccatgggtcaggctgaccttcaacaattatttctagatgatttctggataagaattgctctctcggtaccagacagtttgacatcctccacccttagaaaatgactgacattgttttgttactgctcctacccaccaaggggataaagaaggcgagttctgagtgttggatgagtcagtcgcgtggaaggacgtggagcgtggcgctctgtaacttcctgccgtctgccaccccgccacgtgtatttaaccctcgcactttctccactgtggagatggctggggcggcgccccacagtgtgtattcctgtcctctatgttagagtgcatcagaagcacatttactgtgctatctatatcgctatataaaagtgttttataaaaacccagaataggagcacgacgcatgattggtgtttgaggcgtttgccagctgggacaaactgcgtttggagctgtggttaagctgactaaggaggcggtggctctttcttaacattcccacgtgcccagggctgttcatgcaagattttaatggtgacttgtcctggcttactgggacagtctgtatgaggcatgtcaccacactgtcgcctcatagctgcaagagagaggcaccagctgaagttcccctgactgaagagagcctgtggccatgtaaaaagagaattaaactcttgttgctttttgtatacctgtatgcgtttgtgtagacgtgtgtctcaccagtcacctttgccctgcattgctgatccccttgcgcacactgattctagtgaggtcacagattcggagcttcacacaccagcccagagaaagggcgatggaaccgaaccgagggtctgcagctttcgttagcagagctgtcagattcttgacagtcttggaggatggagaaattcaagcagcagctggtgagggccaaaacagaatacttggcttcttcagaatcttagattgcactgagtttagtcctaaatattttgctaacaaatttccttggccagaatcagttgtaagacagtgatttgggtggtggggggagggaggagggagaggatatgattaatgtggtctctttggctgatcgaaagctagatcaactggtacttagggcacttgctgtttataaagcaaaattgagaaaatattcaaggtgcctccatcgcctgaactacaaaatgcccttggccttcctcacatggggtctgtcaccttgcatctctgataagccatccaccttcctggtcagtgcctacagggggagagcctttctgagaagcaggtcctgtggtatctgagaatggtctagagagctccccactgcccatctgcccccgaatttcctgccaagctctggggagtggggtggggggagggacgtccgatggatgacaggccgccagcccagacgtggggagagaagcctgagtcctttcctgtgtgataaaatcaggctaatttacttggatttggggtgatttgtttggtttttagcatttatgaggtgagcccatgaagttagtggtccattactttttaaagatgcattttcattttaaactgtctcctggcctgtggatttgtggaatggacagttttgtgggttttaatttatttgtgaggagtcggggctgagaaggcattttatcaggaggtctccttttgcacgtccatgacatgagcttttcggaggcaaaggaagtggaggagggtgagagatgcaggtcactgccagaggcacctctgtgacacggaacattccagacacgtcgcagccttgggcttcggcgaggaggaagtctgagcctgtgaagcgagaaggccaggcagtagactggctctgaggttttgccctttgacctcctccacagagggcagcttcagccccttgtaagccctgccccctctcaggactgccctgaggcctctccagtcctccccacactcagagatctgtggggaagctccgcccagccacactccttgggataatactagccggttctgcctgattccttttcccccggagccagcctagggggcccgggactcctctagtgagccttgactgttaggtaagagacaggaagcagacaagccaagaggttgctgcagctgcccccaggaggaaacgggcagcagggagtgtggcccagcccccactgtacccctccaggggcccgagcccttgccagcccaatgacaccttgaagtcaccacttttcctttcttgcccgctaataaaacctatttaaacaggaaattcataccaaatgcaaatgggttttgttttccttggcattttgttgttccgatcacagatttccctgccagggtgtctgtggttatcagctgcaggctcagcttggggcggccgcttcacacaagccactctgtaccacgtgccctaccttagtgacgggagtaaggagcttccttcccctccatgtcattccttcctgttcccttcattccccaacagcaaataaaactgttgaatgctctgaaaaaaaaaaaaaaaaaaa

SEQ ID NO: 737 - protein, 368 aa, Homo Sapiens
MLSKRGCHARIYADFPIRRLISQRSSLETLEDIEENAPLRRCRTLSGSPRPKNFKKIHFIKNMRQHDTRNGRIVLISGRRSFCSIFSVLPYRDSTQVGDLKLDGGRQSTGAVSLKEIIGLEGVELGADGKTVSYTQFLLPTNAFGARRNTIDSTSSFSQFRNLSHRSLSIGRASGTQGSLDTGSDLGDFMDYDPNLLDDPQWPCGKHKRVLIFPSYMTTVIDYVKPSDLKKDMNETFKEKFPHIKLTLSKIRSLKREMRKLAQEDCGLEEPTVAMAFVYFEKLALKGKLNKQNRKLCAGACVLLAAKIGSDLKKHEVKHLIDKLEEKFRLNRRELIAFEFPVLVALEFALHLPEHEVMPHYRRLVQSS

SEQ ID NO: 738 - DNA, 1409 bp, Homo Sapiens; identical to SEQ ID NO: 730

SEQ ID NO: 739 - protein, 390 aa, Homo Sapiens; identical to SEQ ID NO: 731

SEQ ID NO: 740 - DNA, 2659 bp, Homo Sapiens
ggcgagcgagcgggcggccggccgctgggggtggcgggataggctgggcgcggccggcgctgcagacccgctgctgttgtccgggtctgtgcggtcccgagggccctccgtgccgccggcgccatgggcaattgccacacggtggggcccaacgaggcgctggtggtttcagggggctgttgtggttccgactataaacagtacgtgtttggcggctgggcctgggcctggtggtgtatctccgacactcagaggatttccctagagattatgacgttgcagccccgctgcgaggacgtagagacggccgagggggtagctttaactgtgacgggtgtcgcccaggtgaagatcatgacggagaaggaactcctggccgtggcttgtgagcagtttctgggtaagaatgtgcaggacatcaaaaacgtcgtcctgcagaccctggagggacatctgcgctccatcctcgggaccctgacagtggagcagatttatcaggaccgggaccagtttgccaagctggtgcgggaggtggcagcccctgatgttggccgcatgggcattgagatcctcagcttcaccatcaaggacgtgtatgacaaagtggactatctgagctccctgggcaagacgcagactgccgtggtgcagagagatgctgacattggcgtggccgaggctgaacgggacgcaggcatccgggaagctgagtgcaagaaggagatgctggatgtgaagttcatggcagacaccaagattgctgactctaagcgagccttcgagctgcaaaagtcagccttcagtgaggaggttaacatcaagacagctgaggcccagttggcctatgagctgcagggggcccgtgaacagcagaagatccggcaggaagagattgagattgaggttgtgcagcgcaagaaacagattgccgtggaggcacaggagatcctgcgtacggacaaggagctcatcgctacagtgcgccggcctgccgaggccgaggcccaccgcatccagcagattgccgagggtgaaaaggtgaagcaggtcctcttggcacaggcagaggctgagaagatccgcaaaatcggggaggcggaagcggcagtcatcgaggcgatgggcaaggcagaggctgagcggatgaagctcaaggcagaagcctaccagaaatacggggatgcagccaagatggccttggtgctagaggccctgccccagattgctgccaaaatcgctgccccacttaccaaggtcgatgagattgtggtcctcagtggagacaacagtaaggtcacatcagaagtgaaccgactgctggccgagctgcctgcctctgtgcatgccctcacaggcgtggacctgtctaagatacccctgatcaagaaggccactggtgtgcaggtgtgaggctcctgcaggcccactctcttcagcagccacccggccctccctccagcacccgttttaatcccacagaacaacgggaacgttactgactctggtgccttatctcgaagggaccagaagtgctgcgtgttcaggccatctctggctgtcttcctgtctctcctgtctgtccacctcctcctcttcctctcctttaccccactttcactgccactttcatcaggtttgtgtctcatctccctgcgtgtcttttcctttgtctgtctttttctttcccccatgcacatcatgtagattaagctgaagatgtttattacaatcactctctgtggggggtggccctgctgctcctcagaatcctggtgccttgaagttctctgtgcatctgtccatcctccctatggccctggccagagctcagcatgggcaggggttctgggtaggacggtcactgtcctctctcctggactggtcttcccagccctaaaccctgccccaggaagcccacagcctcacctgctgctgcccctctaggtctgggcagccatgacctgcagggcccagagacactgtccttcccctcatccacccaaggccccagccagcgctcataccctgtcctttctccctgaccccaagggcacagaggcaaggcctcctgtctacagcagcttcctcagtttcctactgccttaggaggcccctgcttgtgctcagggaaggcctcttcatgggcatgttcctgctggggcggtgcggtttggtcccaactctgctaagttttctgagatgagggtctagccctgttggggacagaaaagtgtgtagaccttcttcctgctagggctgcactgtcctgggtgttgggcccttctggtggacaaggctgtgccaaccctgtacagaatcgagtgctgtagcctggccagaccccagagcccttgtgccatctttcttcctggccagagtgatggggttccagccatggggaagcaacccaatcctctgtctccttgctccaatggaggcagaagagcccaggacccaagcgtcttggcaggggtgctgtgaatgtccagtggtcccagctccccaccctggccctgccccagcctgtgtagctcttcctgcatgtggatgctgcatgtctggtctggggcttggatgttgcactgccccactgcctgtcccttctggtaaaataaagaactcttaatgcccaaaaaaaaaaaaaaaaaaaaaaaaaaaa

SEQ ID NO: 741 - protein, 428 aa, Homo Sapiens
MGNCHTVGPNEALVVSGGCCGSDYKQYVFGGWAWAWWCISDTQRISLEIMTLQPRCEDVETAEGVALTVTGVAQVKIMTEKELLAVACEQFLGKNVQDIKNVVLQTLEGHLRSILGTLTVEQIYQDRDQFAKLVREVAAPDVGRMGIEILSFTIKDVYDKVDYLSSLGKTQTAVVQRDADIGVAEAERDAGIREAECKKEMLDVKFMADTKIADSKRAFELQKSAFSEEVNIKTAEAQLAYELQGAREQQKIRQEEIEIEVVQRKKQIAVEAQEILRTDKELIATVRRPAEAEAHRIQQIAEGEKVKQVLLAQAEAEKIRKIGEAEAAVIEAMGKAEAERMKLKAEAYQKYGDAAKMALVLEALPQIAAKIAAPLTKVDEIVVLSGDNSKVTSEVNRLLAELPASVHALTGVDLSKIPLIKKATGVQV

SEQ ID NO: 742 - DNA, 6701 bp, Homo Sapiens
aggggaggagagcggcccatggacccgcggggcccggcgccccagactctgcgccgtcgggacggagcccaagatgtcggcctaggccggggcgcgacgacgcggacggggcggcgaggaggcgccgctgctgccggggctcgcagccgccgagcccccgagggcgcgccctgacggactggccgagccggcggtgagaggccggcgcgtcgggagcgggccgcgcggcaccatgtcggccaaggtgcggctcaagaagctggagcagctgctcctggacgggccctggcgcaacgagagcgccctgagcgtggaaacgctgctcgacgtgctcgtctgcctgtacaccgagtgcagccactcggccctgcgccgcgacaagtacgtggccgagttcctcgagtgggctaaaccatttacacagctggtgaaagaaatgcagcttcatcgagaagactttgaaataattaaagtaattggaagaggtgcttttggtgaggttgctgttgtcaaaatgaagaatactgaacgaatttatgcaatgaaaatcctcaacaagtgggagatgctgaaaagagcagagaccgcgtgcttccgagaggagcgcgatgtgctggtgaacggcgactgccagtggatcaccgcgctgcactacgcctttcaggacgagaaccacctgtacttagtcatggattactatgtgggtggtgatttactgaccctgctcagcaaatttgaagacaagcttccggaagatatggcgaggttctacattggtgaaatggtgctggccattgactccatccatcagcttcattacgtgcacagagacattaaacctgacaatgtccttttggacgtgaatggtcatatccgcctggctgactttggatcatgtttgaagatgaatgatgatggcactgtgcagtcctccgtggccgtgggcacacctgactacatctcgccggagatcctgcaggcgatggaggacggcatgggcaaatacgggcctgagtgtgactggtggtctctgggtgtctgcatgtatgagatgctctatggagaaacgccgttttatgcggagtcactcgtggagacctatgggaagatcatgaaccatgaagagcgattccagttcccatcccatgtcacggatgtatctgaagaagcgaaggacctcatccagagactgatctgcagtagagaacgccggctggggcagaatggaatagaggatttcaaaaagcatgcgttttttgaaggtctaaattgggaaaatatacgaaacctagaagcaccttatattcctgatgtgagcagtccctctgacacatccaacttcgacgtggatgacgacgtgctgagaaacacggaaatattacctcctggttctcacacaggcttttctggattacatttgccattcattggttttacattcacaacggaaagctgtttttctgatcgaggctctctgaagagcataatgcagtccaacacattaaccaaagatgaggatgtgcagcgggacctggagcacagcctgcagatggaagcttacgagaggaggattcggaggctggaacaggagaagctggagctgagcaggaagctgcaagagtccacccagaccgtgcagtccctccacggctcatctcgggccctcagcaattcaaaccgagataaagaaatcaaaaagctaaatgaagaaatcgaacgcttgaagaataaaatagcagattcaaacaggctcgagcgacagcttgaggacacagtggcgcttcgccaagagcgtgaggactccacgcagcggctgcgggggctggagaagcagcaccgcgtggtccggcaggagaaggaggagctgcacaagcaactggttgaagcctcagagcggttgaaatcccaggccaaggaactcaaagatgcccatcagcagcgaaagctggccctgcaggagttctcggagctgaacgagcgcatggcagagctccgtgcccagaagcagaaggtgtcccggcagctgcgagacaaggaggaggagatggaggtggccacgcagaaggtggacgccatgcggcaggaaatgcggagagctgagaagctcaggaaagagctggaagctcagcttgatgatgctgttgctgaggcctccaaggagcgcaagcttcgtgagcacagcgagaacttctgcaagcaaatggaaagcgagctggaggccctcaaggtgaagcaaggaggccggggagcgggtgccaccttagagcaccagcaagagatttccaaaatcaaatccgagctggagaagaaagtcttattttatgaagaggaattggtcagacgtgaggcctcccatgtgctagaagtgaaaaatgtgaagaaggaggtgcatgattcagaaagccaccagctggccctgcagaaagaaatcttgatgttaaaagataagttagaaaagtcaaagcgagaacggcataacgagatggaggaggcagtaggtacaataaaagataaatacgaacgagaaagagcgatgctgtttgatgaaaacaagaagctaactgctgaaaatgaaaagctctgttcctttgtggataaactcacagctcaaaatagacagctggaggatgagctgcaggatctggcagccaagaaggagtcagtggcccactgggaagctcagattgcggaaatcattcagtgggtcagtgacgagaaagatgcccggggttaccttcaagctcttgcttccaagatgaccgaagagctcgaggctttgaggagttctagtctggggtcaagaacactggacccgctgtggaaggtgcgccgcagccagaagctggacatgtccgcgcggctggagctgcagtcggccctggaggcggagatccgggccaagcagcttgtccaggaggagctcaggaaggtcaaggacgccaacctcaccttggaaagcaaactaaaggattccgaagccaaaaacagagaattattagaagaaatggaaattttgaagaaaaagatggaagaaaaattcagagcagatactgggctcaaacttccagattttcaggattccatttttgagtatttcaacactgctcctcttgcacatgacctgacatttagaaccagctcagctagtgagcaagaaacacaagctccgaagccagaagcgtccccgtcgatgtctgtggctgcatcagagcagcaggaggacatggctcggcccccgcagaggccatccgctgtgccgttgcccaccacgcaggccctggctctggctggaccgaagccaaaagctcaccagttcagcatcaagtccttctccagccctactcagtgcagccactgcacctccctgatggttgggctgatccggcagggctacgcctgcgaggtgtgttcctttgcttgccacgtgtcctgcaaagacggtgccccccaggtgtgcccaatacctcccgagcagtccaagaggcctctgggcgtggacgtgcagcgaggcatcggaacagcctacaaaggccatgtcaaggtcccaaagcccacgggggtgaagaagggatggcagcgcgcatatgcagtcgtctgtgactgcaagctcttcctgtatgatctgcctgaaggaaaatccacccagcctggtgtcattgcgagccaagtcttggatctcagagatgacgagttttccgtgagctcagtcctggcctcagatgtcattcatgctacacgccgagatattccatgtatattcagggtgacggcctctctcttaggtgcaccttctaagaccagctcgctgctcattctgacagaaaatgagaatgaaaagaggaagtgggttgggattctagaaggactccagtccatccttcataaaaaccggctgaggaatcaggtcgtgcatgttcccttggaagcctacgacagctcgctgcctctcatcaaggccatcctgacagctgccatcgtggatgcagacaggattgcagtcggcctagaagaagggctctatgtcatagaggtcacccgagatgtgatcgtccgtgccgctgactgtaagaaggtacaccagatcgagcttgctcccagggagaagatcgtaatcctcctctgtggccggaaccaccatgtgcacctctatccgtggtcgtcccttgatggagcggaaggcagctttgacatcaagcttccggaaaccaaaggctgccagctcatggccacggccacactcaagaggaactctggcacctgcctgtttgtggccgtgaaacggctgatcctttgctatgagatccagagaacgaagccattccacagaaagttcaatgagattgtggctcccggcagcgtgcagtgcctggcggtgctcagggacaggctctgtgtgggctacccttctgggttctgcctgctgagcatccagggggacgggcagcctctaaacctggtaaatcccaatgacccctcgcttgcgttcctctcacaacagtcttttgatgccctttgtgctgtggagctcgaaagcgaggagtacctgctttgcttcagccacatgggactgtacgtggacccgcaaggccggagggcacgcgcgcaggagctcatgtggcctgcggctcctgtcgcctgtagttgcagccccacccacgtcacggtgtacagcgagtatggcgtggacgtctttgatgtgcgcaccatggagtgggtgcagaccatcggcctgcggaggataaggcccctgaactctgaaggcaccctcaacctcctcaactgcgagcctccacgcttgatctacttcaagagcaagttctcgggagcggttctcaacgtgccggacacctccgacaacagcaagaagcagatgctgcgcaccaggagcaaaaggcggttcgtcttcaaggtcccagaggaagagagactgcagcagaggcgagagatgcttagagacccagaattgagatccaaaatgatatccaacccaaccaacttcaaccacgtggcccacatgggcccaggcgacggcatgcaggtgctcatggacctgcctctgagtgctgtgcccccctcccaggaggaaaggccgggccccgctcccaccaacctggctcgccagcctccatccaggaacaagccctacatctcgtggccctcatcaggtggatcggagcctagcgtgactgtgcctctgagaagtatgtctgatccagaccaggactttgacaaagagcctgattcggactccaccaaacactcaactccatcgaatagctccaaccccagcggcccaccgagccccaactccccccacaggagccagctccccctcgaaggcctggagcagccggcctgtgacacctgaagccgccagctcgccacaggggccagggagctggagatggcctccagcgtcagtgccaagactgagcgggccctccagtgttgtccaaggaaatgtagaatcactttgtagatatggagatgaagaagacaaatctttattataatattgatcagttttatgccgcattgttcgtggcagtagaccacatctgttcgtctgcacagctgtgaggcgatgctgttccatctgcacatgaaggacccccatacagcctgtctcccacccctgacaacccgagagggcatatggggccctgccaacaccacttcctcagcagaaacccgtcatgacgcggctgcttcggaagcagacatctggggacacagcctcagtacccagtcttttccctagttcctgaaactttcctaggaccttaagagaatagtaggaggtcctatagcattcccagtgtcactagaattttgaagacaggaaagtggaggttagtctgtggcctttttttcatttagccattgcacagtcagctgcagaagtcctgctgaccacctagtcatggacaaaggcccaggaccagtgacaccctgcgtccctgtgtgcattaagttcattctgggtcgcagccatgaagtgtcaccagtatctactactgtgaagtcagctgtgctgttttccattcgcttccacggcttctgcctcctgccataaaaccagcgagtgtcgtggtgcaggcaggccctgtggcctgctgggctgagggaagtcagagccccagggcgccacgaagcagccactgggataccccaccccgccccgccctgcccgcccccccccccaccagtcctgcccccgcatggagcccccgtgattagtagcccgtatgatcacgtagacccacccaacacactcctgcacactggccccggcccacggcacagcaatcccctgcgcgtggatttcacctcaccctttgtaccagatgttgagtgaccagctctgtggccctgtgtcgtcagaggcttgtgattaactgtggcggcagacacagcttgtccacagcttgggccaggcttcccctgtcctcccaccggtcggctgcttggcaaggctgttcaggacgtgcacttccccaagtcggcactgagtggcccagcaccgcctagccctgccaccccactgccctcctgggccttctgctggatgggcacctggggggttctggtttttacttttttaatgtaagtctcagtctttgtaattaattattgaattgtgagaacatttttgaacaatttacctgtcaataaagcagaagacggcagttttaaagttc

SEQ ID NO: 743 - protein, 1711 aa, Homo Sapiens
MSAKVRLKKLEQLLLDGPWRNESALSVETLLDVLVCLYTECSHSALRRDKYVAEFLEWAKPFTQLVKEMQLHREDFEIIKVIGRGAFGEVAVVKMKNTERIYAMKILNKWEMLKRAETACFREERDVLVNGDCQWITALHYAFQDENHLYLVMDYYVGGDLLTLLSKFEDKLPEDMARFYIGEMVLAIDSIHQLHYVHRDIKPDNVLLDVNGHIRLADFGSCLKMNDDGTVQSSVAVGTPDYISPEILQAMEDGMGKYGPECDWWSLGVCMYEMLYGETPFYAESLVETYGKIMNHEERFQFPSHVTDVSEEAKDLIQRLICSRERRLGQNGIEDFKKHAFFEGLNWENIRNLEAPYIPDVSSPSDTSNFDVDDDVLRNTEILPPGSHTGFSGLHLPFIGFTFTTESCFSDRGSLKSIMQSNTLTKDEDVQRDLEHSLQMEAYERRIRRLEQEKLELSRKLQESTQTVQSLHGSSRALSNSNRDKEIKKLNEEIERLKNKIADSNRLERQLEDTVALRQEREDSTQRLRGLEKQHRVVRQEKEELHKQLVEASERLKSQAKELKDAHQQRKLALQEFSELNERMAELRAQKQKVSRQLRDKEEEMEVATQKVDAMRQEMRRAEKLRKELEAQLDDAVAEASKERKLREHSENFCKQMESELEALKVKQGGRGAGATLEHQQEISKIKSELEKKVLFYEEELVRREASHVLEVKNVKKEVHDSESHQLALQKEILMLKDKLEKSKRERHNEMEEAVGTIKDKYERERAMLFDENKKLTAENEKLCSFVDKLTAQNRQLEDELQDLAAKKESVAHWEAQIAEIIQWVSDEKDARGYLQALASKMTEELEALRSSSLGSRTLDPLWKVRRSQKLDMSARLELQSALEAEIRAKQLVQEELRKVKDANLTLESKLKDSEAKNRELLEEMEILKKKMEEKFRADTGLKLPDFQDSIFEYFNTAPLAHDLTFRTSSASEQETQAPKPEASPSMSVAASEQQEDMARPPQRPSAVPLPTTQALALAGPKPKAHQFSIKSFSSPTQCSHCTSLMVGLIRQGYACEVCSFACHVSCKDGAPQVCPIPPEQSKRPLGVDVQRGIGTAYKGHVKVPKPTGVKKGWQRAYAVVCDCKLFLYDLPEGKSTQPGVIASQVLDLRDDEFSVSSVLASDVIHATRRDIPCIFRVTASLLGAPSKTSSLLILTENENEKRKWVGILEGLQSILHKNRLRNQVVHVPLEAYDSSLPLIKAILTAAIVDADRIAVGLEEGLYVIEVTRDVIVRAADCKKVHQIELAPREKIVILLCGRNHHVHLYPWSSLDGAEGSFDIKLPETKGCQLMATATLKRNSGTCLFVAVKRLILCYEIQRTKPFHRKFNEIVAPGSVQCLAVLRDRLCVGYPSGFCLLSIQGDGQPLNLVNPNDPSLAFLSQQSFDALCAVELESEEYLLCFSHMGLYVDPQGRRARAQELMWPAAPVACSCSPTHVTVYSEYGVDVFDVRTMEWVQTIGLRRIRPLNSEGTLNLLNCEPPRLIYFKSKFSGAVLNVPDTSDNSKKQMLRTRSKRRFVFKVPEEERLQQRREMLRDPELRSKMISNPTNFNHVAHMGPGDGMQVLMDLPLSAVPPSQEERPGPAPTNLARQPPSRNKPYISWPSSGGSEPSVTVPLRSMSDPDQDFDKEPDSDSTKHSTPSNSSNPSGPPSPNSPHRSQLPLEGLEQPACDT

SEQ ID NO: 744 - DNA, 14905 bp, Homo Sapiens
cagcggtgcgagctccaggcccatgcactgaggaggcggaaacaaggggagcccccagagctccatcaagccccctccaaaggctcccctacccggtccacgccccccaccccccctccccgcctcctcccaattgtgcatttttgcagccggaggcggctccgagatggggctgtgagcttcgcccggggagggggaaagagcagcgaggagtgaagcgggggggtggggtgaagggtttggatttcggggcagggggcgcacccccgtcagcaggccctccccaaggggctcggaactctacctcttcacccacgcccctggtgcgctttgccgaaggaaagaataagaacagagaaggaggagggggaaaggaggaaaagggggaccccccaactggggggggtgaaggagagaagtagcaggaccagaggggaaggggctgctgcttgcatcagcccacaccatgctgaccccgccgttgctcctgctgctgcccctgctctcagctctggtcgcggcggctatcgacgcccctaagacttgcagccccaagcagtttgcctgcagagatcaaataacctgtatctcaaagggctggcggtgcgacggtgagagggactgcccagacggatctgacgaggcccctgagatttgtccacagagtaaggcccagcgatgccagccaaacgagcataactgcctgggtactgagctgtgtgttcccatgtcccgcctctgcaatggggtccaggactgcatggacggctcagatgaggggccccactgccgagagctccaaggcaactgctctcgcctgggctgccagcaccattgtgtccccacactcgatgggcccacctgctactgcaacagcagctttcagcttcaggcagatggcaagacctgcaaagattttgatgagtgctcagtgtacggcacctgcagccagctatgcaccaacacagacggctccttcatatgtggctgtgttgaaggatacctcctgcagccggataaccgctcctgcaaggccaagaacgagccagtagaccggccccctgtgctgttgatagccaactcccagaacatcttggccacgtacctgagtggggcccaggtgtctaccatcacacctacgagcacgcggcagaccacagccatggacttcagctatgccaacgagaccgtatgctgggtgcatgttggggacagtgctgctcagacgcagctcaagtgtgcccgcatgcctggcctaaagggcttcgtggatgagcacaccatcaacatctccctcagtctgcaccacgtggaacagatggccatcgactggctgacaggcaacttctactttgtggatgacatcgatgataggatctttgtctgcaacagaaatggggacacatgtgtcacattgctagacctggaactctacaaccccaagggcattgccctggaccctgccatggggaaggtgtttttcactgactatgggcagatcccaaaggtggaacgctgtgacatggatgggcagaaccgcaccaagctcgtcgacagcaagattgtgtttcctcatggcatcacgctggacctggtcagccgccttgtctactgggcagatgcctatctggactatattgaagtggtggactatgagggcaagggccgccagaccatcatccagggcatcctgattgagcacctgtacggcctgactgtgtttgagaattatctctatgccaccaactcggacaatgccaatgcccagcagaagacgagtgtgatccgtgtgaaccgctttaacagcaccgagtaccaggttgtcacccgggtggacaagggtggtgccctccacatctaccaccagaggcgtcagccccgagtgaggagccatgcctgtgaaaacgaccagtatgggaagccgggtggctgctctgacatctgcctgctggccaacagccacaaggcgcggacctgccgctgccgttccggcttcagcctgggcagtgacgggaagtcatgcaagaagccggagcatgagctgttcctcgtgtatggcaagggccggccaggcatcatccggggcatggatatgggggccaaggtcccggatgagcacatgatccccattgaaaacctcatgaacccccgagccctggacttccacgctgagaccggcttcatctactttgccgacaccaccagctacctcattggccgccagaagattgatggcactgagcgggagaccatcctgaaggacggcatccacaatgtggagggtgtggccgtggactggatgggagacaatctgtactggacggacgatgggcccaaaaagacaatcagcgtggccaggctggagaaagctgctcagacccgcaagactttaatcgagggcaaaatgacacaccccagggctattgtggtggatccactcaatgggtggatgtactggacagactgggaggaggaccccaaggacagtcggcgtgggcggctggagagggcgtggatggatggctcacaccgagacatctttgtcacctccaagacagtgctttggcccaatgggctaagcctggacatcccggctgggcgcctctactgggtggatgccttctacgaccgcatcgagacgatactgctcaatggcacagaccggaagattgtgtatgaaggtcctgagctgaaccacgcctttggcctgtgtcaccatggcaactacctcttctggactgagtatcggagtggcagtgtctaccgcttggaacggggtgtaggaggcgcaccccccactgtgacccttctgcgcagtgagcggccccccatctttgagatccgaatgtatgatgcccagcagcagcaagttggcaccaacaaatgccgggtgaacaatggcggctgcagcagcctgtgcttggccacccctgggagccgccagtgcgcctgtgctgaggaccaggtgttggacgcagacggcgtcacttgcttggcgaacccatcctacgtgcctccaccccagtgccagccaggcgagtttgcctgtgccaacagccgctgcatccaggagcgctggaagtgtgacggagacaacgattgcctggacaacagtgatgaggccccagccctctgccatcagcacacctgcccctcggaccgattcaagtgcgagaacaaccggtgcatccccaaccgctggctctgcgacggggacaatgactgtgggaacagtgaagatgagtccaatgccacttgttcagcccgcacctgcccccccaaccagttctcctgtgccagtggccgctgcatccccatctcctggacgtgtgatctggatgacgactgtggggaccgctctgatgagtctgcttcgtgtgcctatcccacctgcttccccctgactcagtttacctgcaacaatggcagatgtatcaacatcaactggagatgcgacaatgacaatgactgtggggacaacagtgacgaagccggctgcagccactcctgttctagcacccagttcaagtgcaacagcgggcgttgcatccccgagcactggacctgcgatggggacaatgactgcggagactacagtgatgagacacacgccaactgcaccaaccaggccacgaggccccctggtggctgccacactgatgagttccagtgccggctggatggactatgcatccccctgcggtggcgctgcgatggggacactgactgcatggactccagcgatgagaagagctgtgagggagtgacccacgtctgcgatcccagtgtcaagtttggctgcaaggactcagctcggtgcatcagcaaagcgtgggtgtgtgatggcgacaatgactgtgaggataactcggacgaggagaactgcgagtccctggcctgcaggccaccctcgcacccttgtgccaacaacacctcagtctgcctgccccctgacaagctgtgtgatggcaacgacgactgtggcgacggctcagatgagggcgagctctgcgaccagtgctctctgaataacggtggctgcagccacaactgctcagtggcacctggcgaaggcattgtgtgttcctgccctctgggcatggagctggggcccgacaaccacacctgccagatccagagctactgtgccaagcatctcaaatgcagccaaaagtgcgaccagaacaagttcagcgtgaagtgctcctgctacgagggctgggtcctggaacctgacggcgagagctgccgcagcctggaccccttcaagccgttcatcattttctccaaccgccatgaaatccggcgcatcgatcttcacaaaggagactacagcgtcctggtgcccggcctgcgcaacaccatcgccctggacttccacctcagccagagcgccctctactggaccgacgtggtggaggacaagatctaccgcgggaagctgctggacaacggagccctgactagtttcgaggtggtgattcagtatggcctggccacacccgagggcctggctgtagactggattgcaggcaacatctactgggtggagagtaacctggatcagatcgaggtggccaagctggatgggaccctccggaccaccctgctggccggtgacattgagcacccaagggcaatcgcactggatccccgggatgggatcctgttttggacagactgggatgccagcctgccccgcattgaggcagcctccatgagtggggctgggcgccgcaccgtgcaccgggagaccggctctgggggctggcccaacgggctcaccgtggactacctggagaagcgcatcctttggattgacgccaggtcagatgccatttactcagcccgttacgacggctctggccacatggaggtgcttcggggacacgagttcctgtcgcacccgtttgcagtgacgctgtacgggggggaggtctactggactgactggcgaacaaacacactggctaaggccaacaagtggaccggccacaatgtcaccgtggtacagaggaccaacacccagccctttgacctgcaggtgtaccacccctcccgccagcccatggctcccaatccctgtgaggccaatgggggccagggcccctgctcccacctgtgtctcatcaactacaaccggaccgtgtcctgcgcctgcccccacctcatgaagctccacaaggacaacaccacctgctatgagtttaagaagttcctgctgtacgcacgtcagatggagatccgaggtgtggacctggatgctccctactacaactacatcatctccttcacggtgcccgacatcgacaacgtcacagtgctagactacgatgcccgcgagcagcgtgtgtactggtctgacgtgcggacacaggccatcaagcgggccttcatcaacggcacaggcgtggagacagtcgtctctgcagacttgccaaatgcccacgggctggctgtggactgggtctcccgaaacctgttctggacaagctatgacaccaataagaagcagatcaatgtggcccggctggatggctccttcaagaacgcagtggtgcagggcctggagcagccccatggccttgtcgtccaccctctgcgtgggaagctctactggaccgatggtgacaacatcagcatggccaacatggatggcagcaatcgcaccctgctcttcagtggccagaagggccccgtgggcctggctattgacttccctgaaagcaaactctactggatcagctccgggaaccataccatcaaccgctgcaacctggatgggagtgggctggaggtcatcgatgccatgcggagccagctgggcaaggccaccgccctggccatcatgggggacaagctgtggtgggctgatcaggtgtcggaaaagatgggcacatgcagcaaggctgacggctcgggctccgtggtccttcggaacagcaccaccctggtgatgcacatgaaggtctatgacgagagcatccagctggaccataagggcaccaacccctgcagtgtcaacaacggtgactgctcccagctctgcctgcccacgtcagagacgacccgctcctgcatgtgcacagccggctatagcctccggagtggccagcaggcctgcgagggcgtaggttcctttctcctgtactctgtgcatgagggaatcaggggaattcccctggatcccaatgacaagtcagatgccctggtcccagtgtccgggacctcgctggctgtcggcatcgacttccacgctgaaaatgacaccatctactgggtggacatgggcctgagcacgatcagccgggccaagcgggaccagacgtggcgtgaagacgtggtgaccaatggcattggccgtgtggagggcattgcagtggactggatcgcaggcaacatctactggacagaccagggctttgatgtcatcgaggtcgcccggctcaatggctccttccgctacgtggtgatctcccagggtctagacaagccccgggccatcaccgtccacccggagaaagggtacttgttctggactgagtggggtcagtatccgcgtattgagcggtctcggctagatggcacggagcgtgtggtgctggtcaacgtcagcatcagctggcccaacggcatctcagtggactaccaggatgggaagctgtactggtgcgatgcacggacagacaagattgaacggatcgacctggagacaggtgagaaccgcgaggtggttctgtccagcaacaacatggacatgttttcagtgtctgtgtttgaggatttcatctactggagtgacaggactcatgccaacggctctatcaagcgcgggagcaaagacaatgccacagactccgtgcccctgcgaaccggcatcggcgtccagcttaaagacatcaaagtcttcaaccgggaccggcagaaaggcaccaacgtgtgcgcggtggccaatggcgggtgccagcagctgtgcctgtaccggggccgtgggcagcgggcctgcgcctgtgcccacgggatgctggctgaagacggagcatcgtgccgcgagtatgccggctacctgctctactcagagcgcaccattctcaagagtatccacctgtcggatgagcgcaacctcaatgcgcccgtgcagcccttcgaggaccctgagcacatgaagaacgtcatcgccctggcctttgactaccgggcaggcacctctccgggcacccccaatcgcatcttcttcagcgacatccactttgggaacatccaacagatcaacgacgatggctccaggaggatcaccattgtggaaaacgtgggctccgtggaaggcctggcctatcaccgtggctgggacactctctattggacaagctacacgacatccaccatcacgcgccacacagtggaccagacccgcccaggggccttcgagcgtgagaccgtcatcactatgtctggagatgaccacccacgggccttcgttttggacgagtgccagaacctcatgttctggaccaactggaatgagcagcatcccagcatcatgcgggcggcgctctcgggagccaatgtcctgacccttatcgagaaggacatccgtacccccaatggcctggccatcgaccaccgtgccgagaagctctacttctctgacgccaccctggacaagatcgagcggtgcgagtatgacggctcccaccgctatgtgatcctaaagtcagagcctgtccaccccttcgggctggccgtgtatggggagcacattttctggactgactgggtgcggcgggcagtgcagcgggccaacaagcacgtgggcagcaacatgaagctgctgcgcgtggacatcccccagcagcccatgggcatcatcgccgtggccaacgacaccaacagctgtgaactctctccatgccgaatcaacaacggtggctgccaggacctgtgtctgctcactcaccagggccatgtcaactgctcatgccgagggggccgaatcctccaggatgacctcacctgccgagcggtgaattcctcttgccgagcacaagatgagtttgagtgtgccaatggcgagtgcatcaacttcagcctgacctgcgacggcgtcccccactgcaaggacaagtccgatgagaagccatcctactgcaactcccgccgctgcaagaagactttccggcagtgcagcaatgggcgctgtgtgtccaacatgctgtggtgcaacggggccgacgactgtggggatggctctgacgagatcccttgcaacaagacagcctgtggtgtgggcgagttccgctgccgggacgggacctgcatcgggaactccagccgctgcaaccagtttgtggattgtgaggacgcctcagatgagatgaactgcagtgccaccgactgcagcagctacttccgcctgggcgtgaagggcgtgctcttccagccctgcgagcggacctcactctgctacgcacccagctgggtgtgtgatggcgccaatgactgtggggactacagtgatgagcgcgactgcccaggtgtgaaacgccccagatgccctctgaattacttcgcctgccctagtgggcgctgcatccccatgagctggacgtgtgacaaagaggatgactgtgaacatggcgaggacgagacccactgcaacaagttctgctcagaggcccagtttgagtgccagaaccatcgctgcatctccaagcagtggctgtgtgacggcagcgatgactgtggggatggctcagacgaggctgctcactgtgaaggcaagacgtgcggcccctcctccttctcctgccctggcacccacgtgtgcgtccccgagcgctggctctgtgacggtgacaaagactgtgctgatggtgcagacgagagcatcgcagctggttgcttgtacaacagcacttgtgacgaccgtgagttcatgtgccagaaccgccagtgcatccccaagcacttcgtgtgtgaccacgaccgtgactgtgcagatggctctgatgagtcccccgagtgtgagtacccgacctgcggccccagtgagttccgctgtgccaatgggcgctgtctgagctcccgccagtgggagtgtgatggcgagaatgactgccacgaccagagtgacgaggctcccaagaacccacactgcaccagccaagagcacaagtgcaatgcctcgtcacagttcctgtgcagcagtgggcgctgtgtggctgaggcactgctctgcaacggccaggatgactgtggcgacagctcggacgagcgtggctgccacatcaatgagtgtctcagccgcaagctcagtggctgcagccaggactgtgaggacctcaagatcggcttcaagtgccgctgtcgccctggcttccggctgaaggacgacggccggacgtgtgctgatgtggacgagtgcagcaccaccttcccctgcagccagcgctgcatcaacactcatggcagctataagtgtctgtgtgtggagggctatgcaccccgcggcggcgacccccacagctgcaaggctgtgactgacgaggaaccgtttctgatcttcgccaaccggtactacctgcgcaagctcaacctggacgggtccaactacacgttacttaagcagggcctgaacaacgccgttgccttggattttgactaccgagagcagatgatctactggacagatgtgaccacccagggcagcatgatccgaaggatgcaccttaacgggagcaatgtgcaggtcctacaccgtacaggcctcagcaaccccgatgggctggctgtggactgggtgggtggcaacctgtactggtgcgacaaaggccgggacaccatcgaggtgtccaagctcaatggggcctatcggacggtgctggtcagctctggcctccgtgagcccagggctctggtggtggatgtgcagaatgggtacctgtactggacagactggggtgaccattcactgatcggccgcatcggcatggatgggtccagccgcagcgtcatcgtggacaccaagatcacatggcccaatggcctgacgctggactatgtcactgagcgcatctactgggccgacgcccgcgaggactacattgaatttgccagcctggatggctccaatcgccacgttgtgctgagccaggacatcccgcacatctttgcactgaccctgtttgaggactacgtctactggaccgactgggaaacaaagtccattaaccgagcccacaagaccacgggcaccaacaaaacgctcctcatcagcacgctgcaccggcccatggacctgcatgtcttccatgccctgcgccagccagacgtgcccaatcacccctgcaaggtcaacaatggtggctgcagcaacctgtgcctgctgtcccccgggggagggcacaaatgtgcctgccccaccaacttctacctgggcagcgatgggcgcacctgtgtgtccaactgcacggctagccagtttgtatgcaagaacgacaagtgcatccccttctggtggaagtgtgacaccgaggacgactgcggggaccactcagacgagcccccggactgccctgagttcaagtgccggcccggacagttccagtgctccacaggtatctgcacaaaccctgccttcatctgcgatggcgacaatgactgccaggacaacagtgacgaggccaactgtgacatccacgtctgcttgcccagtcagttcaaatgcaccaacaccaaccgctgtattcccggcatcttccgctgcaatgggcaggacaactgcggagatggggaggatgagagggactgccccgaggtgacctgcgcccccaaccagttccagtgctccattaccaaacggtgcatcccccgggtctgggtctgcgaccgggacaatgactgtgtggatggcagtgatgagcccgccaactgcacccagatgacctgtggtgtggacgagttccgctgcaaggattcgggccgctgcatcccagcgcgttggaagtgtgacggagaggatgactgtggggatggctcggatgagcccaaggaagagtgtgatgaacgcacctgtgagccataccagttccgctgcaagaacaaccgctgcgtgcccggccgctggcagtgcgactacgacaacgattgcggtgacaactccgatgaagagagctgcacccctcggccctgctccgagagtgagttctcctgtgccaacggccgctgcatcgcggggcgctggaaatgcgatggagaccacgactgcgcggacggctcggacgagaaagactgcaccccccgctgtgacatggaccagttccagtgcaagagcggccactgcatccccctgcgctggcgctgtgacgcagacgccgactgcatggacggcagcgacgaggaggcctgcggcactggcgtgcggacctgccccctggacgagttccagtgcaacaacaccttgtgcaagccgctggcctggaagtgcgatggcgaggatgactgtggggacaactcagatgagaaccccgaggagtgtgcccggttcgtgtgccctcccaaccggcccttccgttgcaagaatgaccgcgtctgtctgtggatcgggcgccaatgcgatggcacggacaactgtggggatgggactgatgaagaggactgtgagccccccacagcccacaccacccactgcaaagacaagaaggagtttctgtgccggaaccagcgctgcctctcctcctccctgcgctgcaacatgttcgatgactgcggggacggctctgacgaggaggactgcagcatcgaccccaagctgaccagctgcgccaccaatgccagcatctgtggggacgaggcacgctgcgtgcgcaccgagaaagcggcctactgtgcctgccgctcgggcttccacaccgtgcccggccagcccggatgccaagacatcaacgagtgcctgcgcttcggcacctgctcccagctctgcaacaacaccaagggcggccacctctgcagctgcgctcggaacttcatgaagacgcacaacacctgcaaggccgaaggctctgagtaccaggtcctgtacatcgctgatgacaatgagatccgcagcctgttccccggccacccccattcggcttacgagcaggcattccagggtgacgagagtgtccgcattgatgctatggatgtccatgtcaaggctggccgtgtctattggaccaactggcacacgggcaccatctcctaccgcagcctgccacctgctgcgcctcctaccacttccaaccgccaccggcgacagattgaccggggtgtcacccacctcaacatttcagggctgaagatgcccagaggcatcgccatcgactgggtggccggaaacgtgtactggaccgactcgggccgagatgtgattgaggtggcgcagatgaagggcgagaaccgcaagacgctcatctcgggcatgattgacgagccccacgccattgtggtggacccactgagggggaccatgtactggtcagactggggcaaccaccccaagattgagacggcagcgatggatgggacgcttcgggagacactggtgcaggacaacattcagtggcccacaggcctggccgtggattatcacaatgagcggctgtactgggcagacgccaagctttcagtcatcggcagcatccggctcaatggcacggaccccattgtggctgctgacagcaaacgaggcctaagtcaccccttcagcatcgacgtctttgaggattacatctatggtgtcacctacatcaataatcgtgtcttcaagatccataagtttggccacagccccttggtcaacctgacagggggcctgagccacgcctctgacgtggtcctttaccatcagcacaagcagcccgaagtgaccaacccatgtgaccgcaagaaatgcgagtggctctgcctgctgagccccagtgggcctgtctgcacctgtcccaatgggaagcggctggacaacggcacatgcgtgcctgtgccctctccaacgccccccccagatgctccccggcctggaacctgtaacctgcagtgcttcaacggtggcagctgtttcctcaatgcacggaggcagcccaagtgccgctgccaaccccgctacacgggtgacaagtgtgaactggaccagtgctgggagcactgtcgcaatgggggcacctgtgctgcctccccctctggcatgcccacgtgccggtgccccacgggcttcacgggccccaaatgcacccagcaggtgtgtgcgggctactgtgccaacaacagcacctgcactgtcaaccagggcaaccagccccagtgccgatgcctacccggcttcctgggcgaccgctgccagtaccggcagtgctctggctactgtgagaactttggcacatgccagatggctgctgatggctcccgacaatgccgctgcactgcctactttgagggatcgaggtgtgaggtgaacaagtgcagccgctgtctcgaaggggcctgtgtggtcaacaagcagagtggggatgtcacctgcaactgcacggatggccgggtggcccccagctgtctgacctgcgtcggccactgcagcaatggcggctcctgtaccatgaacagcaaaatgatgcctgagtgccagtgcccaccccacatgacagggccccggtgtgaggagcacgtcttcagccagcagcagccaggacatatagcctccatcctaatccctctgctgttgctgctgctgctggttctggtggccggagtggtattctggtataagcggcgagtccaaggggctaagggcttccagcaccaacggatgaccaacggggccatgaacgtggagattggaaaccccacctacaagatgtacgaaggcggagagcctgatgatgtgggaggcctactggacgctgactttgccctggaccctgacaagcccaccaacttcaccaaccccgtgtatgccacactctacatggggggccatggcagtcgccactccctggccagcacggacgagaagcgagaactcctgggccggggccctgaggacgagataggggaccccttggcatagggccctgccccgtcggactgcccccagaaagcctcctgccccctgccggtgaagtccttcagtgagcccctccccagccagcccttccctggccccgccggatgtataaatgtaaaaatgaaggaattacattttatatgtgagcgagcaagccggcaagcgagcacagtattatttctccatcccctccctgcctgctccttggcacccccatgctgccttcagggagacaggcagggagggcttggggctgcacctcctaccctcccaccagaacgcaccccactgggagagctggtggtgcagccttcccctccctgtataagacactttgccaaggctctcccctctcgccccatccctgcttgcccgctcccacagcttcctgagggctaattctgggaagggagagttctttgctgcccctgtctggaagacgtggctctgggtgaggtaggcgggaaaggatggagtgttttagttcttgggggaggccaccccaaaccccagccccaactccaggggcacctatgagatggccatgctcaacccccctcccagacaggccctccctgtctccagggcccccaccgaggttcccagggctggagacttcctctggtaaacattcctccagcctcccctcccctggggacgccaaggaggtgggccacacccaggaagggaaagcgggcagccccgttttggggacgtgaacgttttaataatttttgctgaattcctttacaactaaataacacagatattgttataaataaaattgtaaaaaaaaaaaaaaaaaaa

SEQ ID NO: 745 - protein, 4544 aa, Homo Sapiens
MLTPPLLLLLPLLSALVAAAIDAPKTCSPKQFACRDQITCISKGWRCDGERDCPDGSDEAPEICPQSKAQRCQPNEHNCLGTELCVPMSRLCNGVQDCMDGSDEGPHCRELQGNCSRLGCQHHCVPTLDGPTCYCNSSFQLQADGKTCKDFDECSVYGTCSQLCTNTDGSFICGCVEGYLLQPDNRSCKAKNEPVDRPPVLLIANSQNILATYLSGAQVSTITPTSTRQTTAMDFSYANETVCWVHVGDSAAQTQLKCARMPGLKGFVDEHTINISLSLHHVEQMAIDWLTGNFYFVDDIDDRIFVCNRNGDTCVTLLDLELYNPKGIALDPAMGKVFFTDYGQIPKVERCDMDGQNRTKLVDSKIVFPHGITLDLVSRLVYWADAYLDYIEVVDYEGKGRQTIIQGILIEHLYGLTVFENYLYATNSDNANAQQKTSVIRVNRFNSTEYQVVTRVDKGGALHIYHQRRQPRVRSHACENDQYGKPGGCSDICLLANSHKARTCRCRSGFSLGSDGKSCKKPEHELFLVYGKGRPGIIRGMDMGAKVPDEHMIPIENLMNPRALDFHAETGFIYFADTTSYLIGRQKIDGTERETILKDGIHNVEGVAVDWMGDNLYWTDDGPKKTISVARLEKAAQTRKTLIEGKMTHPRAIVVDPLNGWMYWTDWEEDPKDSRRGRLERAWMDGSHRDIFVTSKTVLWPNGLSLDIPAGRLYWVDAFYDRIETILLNGTDRKIVYEGPELNHAFGLCHHGNYLFWTEYRSGSVYRLERGVGGAPPTVTLLRSERPPIFEIRMYDAQQQQVGTNKCRVNNGGCSSLCLATPGSRQCACAEDQVLDADGVTCLANPSYVPPPQCQPGEFACANSRCIQERWKCDGDNDCLDNSDEAPALCHQHTCPSDRFKCENNRCIPNRWLCDGDNDCGNSEDESNATCSARTCPPNQFSCASGRCIPISWTCDLDDDCGDRSDESASCAYPTCFPLTQFTCNNGRCININWRCDNDNDCGDNSDEAGCSHSCSSTQFKCNSGRCIPEHWTCDGDNDCGDYSDETHANCTNQATRPPGGCHTDEFQCRLDGLCIPLRWRCDGDTDCMDSSDEKSCEGVTHVCDPSVKFGCKDSARCISKAWVCDGDNDCEDNSDEENCESLACRPPSHPCANNTSVCLPPDKLCDGNDDCGDGSDEGELCDQCSLNNGGCSHNCSVAPGEGIVCSCPLGMELGPDNHTCQIQSYCAKHLKCSQKCDQNKFSVKCSCYEGWVLEPDGESCRSLDPFKPFIIFSNRHEIRRIDLHKGDYSVLVPGLRNTIALDFHLSQSALYWTDVVEDKIYRGKLLDNGALTSFEVVIQYGLATPEGLAVDWIAGNIYWVESNLDQIEVAKLDGTLRTTLLAGDIEHPRAIALDPRDGILFWTDWDASLPRIEAASMSGAGRRTVHRETGSGGWPNGLTVDYLEKRILWIDARSDAIYSARYDGSGHMEVLRGHEFLSHPFAVTLYGGEVYWTDWRTNTLAKANKWTGHNVTVVQRTNTQPFDLQVYHPSRQPMAPNPCEANGGQGPCSHLCLINYNRTVSCACPHLMKLHKDNTTCYEFKKFLLYARQMEIRGVDLDAPYYNYIISFTVPDIDNVTVLDYDAREQRVYWSDVRTQAIKRAFINGTGVETVVSADLPNAHGLAVDWVSRNLFWTSYDTNKKQINVARLDGSFKNAVVQGLEQPHGLVVHPLRGKLYWTDGDNISMANMDGSNRTLLFSGQKGPVGLAIDFPESKLYWISSGNHTINRCNLDGSGLEVIDAMRSQLGKATALAIMGDKLWWADQVSEKMGTCSKADGSGSVVLRNSTTLVMHMKVYDESIQLDHKGTNPCSVNNGDCSQLCLPTSETTRSCMCTAGYSLRSGQQACEGVGSFLLYSVHEGIRGIPLDPNDKSDALVPVSGTSLAVGIDFHAENDTIYWVDMGLSTISRAKRDQTWREDVVTNGIGRVEGIAVDWIAGNIYWTDQGFDVIEVARLNGSFRYVVISQGLDKPRAITVHPEKGYLFWTEWGQYPRIERSRLDGTERVVLVNVSISWPNGISVDYQDGKLYWCDARTDKIERIDLETGENREVVLSSNNMDMFSVSVFEDFIYWSDRTHANGSIKRGSKDNATDSVPLRTGIGVQLKDIKVFNRDRQKGTNVCAVANGGCQQLCLYRGRGQRACACAHGMLAEDGASCREYAGYLLYSERTILKSIHLSDERNLNAPVQPFEDPEHMKNVIALAFDYRAGTSPGTPNRIFFSDIHFGNIQQINDDGSRRITIVENVGSVEGLAYHRGWDTLYWTSYTTSTITRHTVDQTRPGAFERETVITMSGDDHPRAFVLDECQNLMFWTNWNEQHPSIMRAALSGANVLTLIEKDIRTPNGLAIDHRAEKLYFSDATLDKIERCEYDGSHRYVILKSEPVHPFGLAVYGEHIFWTDWVRRAVQRANKHVGSNMKLLRVDIPQQPMGIIAVANDTNSCELSPCRINNGGCQDLCLLTHQGHVNCSCRGGRILQDDLTCRAVNSSCRAQDEFECANGECINFSLTCDGVPHCKDKSDEKPSYCNSRRCKKTFRQCSNGRCVSNMLWCNGADDCGDGSDEIPCNKTACGVGEFRCRDGTCIGNSSRCNQFVDCEDASDEMNCSATDCSSYFRLGVKGVLFQPCERTSLCYAPSWVCDGANDCGDYSDERDCPGVKRPRCPLNYFACPSGRCIPMSWTCDKEDDCEHGEDETHCNKFCSEAQFECQNHRCISKQWLCDGSDDCGDGSDEAAHCEGKTCGPSSFSCPGTHVCVPERWLCDGDKDCADGADESIAAGCLYNSTCDDREFMCQNRQCIPKHFVCDHDRDCADGSDESPECEYPTCGPSEFRCANGRCLSSRQWECDGENDCHDQSDEAPKNPHCTSQEHKCNASSQFLCSSGRCVAEALLCNGQDDCGDSSDERGCHINECLSRKLSGCSQDCEDLKIGFKCRCRPGFRLKDDGRTCADVDECSTTFPCSQRCINTHGSYKCLCVEGYAPRGGDPHSCKAVTDEEPFLIFANRYYLRKLNLDGSNYTLLKQGLNNAVALDFDYREQMIYWTDVTTQGSMIRRMHLNGSNVQVLHRTGLSNPDGLAVDWVGGNLYWCDKGRDTIEVSKLNGAYRTVLVSSGLREPRALVVDVQNGYLYWTDWGDHSLIGRIGMDGSSRSVIVDTKITWPNGLTLDYVTERIYWADAREDYIEFASLDGSNRHVVLSQDIPHIFALTLFEDYVYWTDWETKSINRAHKTTGTNKTLLISTLHRPMDLHVFHALRQPDVPNHPCKVNNGGCSNLCLLSPGGGHKCACPTNFYLGSDGRTCVSNCTASQFVCKNDKCIPFWWKCDTEDDCGDHSDEPPDCPEFKCRPGQFQCSTGICTNPAFICDGDNDCQDNSDEANCDIHVCLPSQFKCTNTNRCIPGIFRCNGQDNCGDGEDERDCPEVTCAPNQFQCSITKRCIPRVWVCDRDNDCVDGSDEPANCTQMTCGVDEFRCKDSGRCIPARWKCDGEDDCGDGSDEPKEECDERTCEPYQFRCKNNRCVPGRWQCDYDNDCGDNSDEESCTPRPCSESEFSCANGRCIAGRWKCDGDHDCADGSDEKDCTPRCDMDQFQCKSGHCIPLRWRCDADADCMDGSDEEACGTGVRTCPLDEFQCNNTLCKPLAWKCDGEDDCGDNSDENPEECARFVCPPNRPFRCKNDRVCLWIGRQCDGTDNCGDGTDEEDCEPPTAHTTHCKDKKEFLCRNQRCLSSSLRCNMFDDCGDGSDEEDCSIDPKLTSCATNASICGDEARCVRTEKAAYCACRSGFHTVPGQPGCQDINECLRFGTCSQLCNNTKGGHLCSCARNFMKTHNTCKAEGSEYQVLYIADDNEIRSLFPGHPHSAYEQAFQGDESVRIDAMDVHVKAGRVYWTNWHTGTISYRSLPPAAPPTTSNRHRRQIDRGVTHLNISGLKMPRGIAIDWVAGNVYWTDSGRDVIEVAQMKGENRKTLISGMIDEPHAIVVDPLRGTMYWSDWGNHPKIETAAMDGTLRETLVQDNIQWPTGLAVDYHNERLYWADAKLSVIGSIRLNGTDPIVAADSKRGLSHPFSIDVFEDYIYGVTYINNRVFKIHKFGHSPLVNLTGGLSHASDVVLYHQHKQPEVTNPCDRKKCEWLCLLSPSGPVCTCPNGKRLDNGTCVPVPSPTPPPDAPRPGTCNLQCFNGGSCFLNARRQPKCRCQPRYTGDKCELDQCWEHCRNGGTCAASPSGMPTCRCPTGFTGPKCTQQVCAGYCANNSTCTVNQGNQPQCRCLPGFLGDRCQYRQCSGYCENFGTCQMAADGSRQCRCTAYFEGSRCEVNKCSRCLEGACVVNKQSGDVTCNCTDGRVAPSCLTCVGHCSNGGSCTMNSKMMPECQCPPHMTGPRCEEHVFSQQQPGHIASILIPLLLLLLLVLVAGVVFWYKRRVQGAKGFQHQRMTNGAMNVEIGNPTYKMYEGGEPDDVGGLLDADFALDPDKPTNFTNPVYATLYMGGHGSRHSLASTDEKRELLGRGPEDEIGDPLA

SEQ ID NO: 746 - DNA, 2831 bp, Homo Sapiens
gcgcgcccgggtagccaagagggaggagcgcggggagcgccgacagccgcccgcccgcccgcccccgcgacgcccgcgcgcaacagttcccccaaagttgcagcccgggaggcgagcgcgcacgggcggccgaggggcgggcggttggcggggacgcggcctcgcggcccagagcggagagtcccggcgggcggcggcggcatgggcacccggcagaccaagggcagcctggcggagagagccagccccggcgccgcgccgggcccccgacgcgaacggccggacttctgggcgtcgctgctgctgcgcgccggggacaaggcggggcgcgcgggcgcggggatgcccccctaccaccggcgagtcggcatggtccaggagctgctgcggatggtgcgccagggccggcgggaggaggcggggacgctgctgcagcacctgcgccaggacctgggcatggagtcgacctcgctagacgacgttctgtatcgctacgccagcttccggaacctggtggaccccatcacacacgacctcatcatcagcctggcacgctacatccactgtcccaagccggaaggcgatgcactgggcgccatggagaagctgtgccggcagctgacataccacctcagcccccactcccagtggaggcggcaccgggggctggtgaaaaggaagccacaggcctgcctcaaggctgtcctggccggaagccccccagacaacacagtggacctgtcgggaatcccactgacctcccgagacctggagcgggtgaccagctacctacagcgctgtggggagcaggtagacagcgtggagctgggcttcacaggcctcacggacgacatggtcctgcagctgctgccagcactcagcaccctgccccgcctcaccacactggcactcaatggcaaccggttgacccgggccgtgctgcgcgacctcactgacatccttaaggatcccagcaagttccccaatgtcacgtggattgacctgggcaacaacgtggacatcttctccttgccccagcccttcctgctcagcctgcgcaagcgctccccaaagcagggccacctacccaccatcctggagctgggtgagggcccaggcagtggggaggaggtccgggaagggacagtaggccaggaggaccctggagggggccctgtggcacctgccgaagaccaccatgagggcaaggagactgtagctgcagctcagacgtgacatggaagtgaagggcctcaccagggagtccttgttgggtagaatgggcaaggcaggcaggggagggcgcttctcctatcaggtgggttaaggatattgccaaaaattggcctgggccacccacctacagaaaggcaaaccatatcatctggggaaggggatttgtgttaaaacttcccgttggtcctctgcatctgccccctatcccattatctgccatttggttcttaagtcatcccaggccccagagaaccctctcagctcagctcatggccttccccaaagacttgtggaaatgggcacatggctggaggtactgtaagcctgagccattgtgaacaccaagagctttcccccagaaaaagaatacagtagggcccctacatgtactgcattacatttttcatttaggggaacaagctccaaccagaggaatgtgtccccactcaaggaaggtgggaatctttagcaaaattcctgtaactcctggttgcccgagaccccagttccatctatgctaggggtggactgaacgtggcctacctccttatggagacccagccctatttctgaggcccaccttgattctaggcatctgcccataggaccagctatcgctatatcctttgacagagcagcctacgatgccatgtggtagtgctcaggacagacatggtgcccatgcatacaggcataaagtcctgttcagaaatcccctatccaccttccctacccactgctggctgaaaaactaccagacttctatgtgggctctgatgtccttagcatgcagggtaagtgacaaacctggcttccttcttgtcacttgccagtatgacttcactgacctagacaggccgtaagaactctttccccataactcttaagtaatccaccaacacattccagaaaaccgactgcagaaggtgggctttaaaaccttaaaaacctaggacaatgaaggagtccaatcccttggcagatccaacaagatggctggggagagggagaaacaaactggaggctcccaaaggaacctaacttagcaaaggttctcatcttataccctccccttacccaaatactgtcctactgaaagggccctaccagttaagggatctcttctaaataacaggcaacccctagatccaagtagttcagtccaggaagactgggagccaatcactcttgaaccttgtgggcaaacagtatgggggaggaccctcttgacaggccttggtaggcaagattccaacacaggaagacagcaagatggggcctagagtatggggccctacatgctgttaaggttgtggttaggaatggtgcaatgctgcaggagctggaacaaagctacaccaaggaacagagcacagagcagcaggggccgaaattgaggaggccttaaatgctttgagcttttgccttcagtctaaagctgtagaatagggggttaagagcttaggctgaccacagggaagtttacaagctagagcgaatatctggactgctaatatctgacaacagtaggcgaaatttactttttcttcaaatacacattttcaagaattgacacccaagacaaaaaaaaaaaa

SEQ ID NO: 747 - protein, 344 aa, Homo Sapiens
MGTRQTKGSLAERASPGAAPGPRRERPDFWASLLLRAGDKAGRAGAGMPPYHRRVGMVQELLRMVRQGRREEAGTLLQHLRQDLGMESTSLDDVLYRYASFRNLVDPITHDLIISLARYIHCPKPEGDALGAMEKLCRQLTYHLSPHSQWRRHRGLVKRKPQACLKAVLAGSPPDNTVDLSGIPLTSRDLERVTSYLQRCGEQVDSVELGFTGLTDDMVLQLLPALSTLPRLTTLALNGNRLTRAVLRDLTDILKDPSKFPNVTWIDLGNNVDIFSLPQPFLLSLRKRSPKQGHLPTILELGEGPGSGEEVREGTVGQEDPGGGPVAPAEDHHEGKETVAAAQT

SEQ ID NO: 748 - DNA, 875 bp, Homo Sapiens
agccaggccagcagccctagcttctggaaggatccttcaggctccagacacccaacctacccgtggccggatgtctgcctgagccccaccccgaatgccagcccttcttccctgagctcacccagccccagctccaggactgagagccccaggaagcttggagagagcccggcatgtggggctacctgtcgctgatgcctgtcttcctagctgtctgggctatctctggcgtctggatcgtttttgccattgcagtgaccaacaggactgtggacctcagtaaaggctttccctacatcagcatctgcggatccttcccccctcagagctgcatcttcagccaggtgctcaatatgggagctgctctggccgcgtggatctgcattgtccgttaccaccagctccgggactggggcgtcagaaggtggcctaaccagctgatcctatggacgggtcttctgtgtgccctgggcacctccgtggtaggcaatttccaggaaaagaaccagcggcctacgcacttggcaggggccttccttgccttcatcttgggtaacgtctacttctggctgcagctcctcctgtggaggctgaagaggctgccccagcccggggctgcctggattgggcccctccgcctgggcctctgcagcgtctgcaccatcctcattgtggccatgatcgtcctccacgcctgctcgctgcgtagcgtctctgcggcctgcgagtgggtcgtggccatgctgctgttcgcgctcttcggtctcttagccgttgacttctccgccctggagagctgcaccctgtgtgttcagccgtggcccagcctcagccccccgccggcctcccccatctccctgccggtccagctgtag

SEQ ID NO: 749 - protein, 233 aa, Homo Sapiens
MWGYLSLMPVFLAVWAISGVWIVFAIAVTNRTVDLSKGFPYISICGSFPPQSCIFSQVLNMGAALAAWICIVRYHQLRDWGVRRWPNQLILWTGLLCALGTSVVGNFQEKNQRPTHLAGAFLAFILGNVYFWLQLLLWRLKRLPQPGAAWIGPLRLGLCSVCTILIVAMIVLHACSLRSVSAACEWVVAMLLFALFGLLAVDFSALESCTLCVQPWPSLSPPPASPISLPVQL

SEQ ID NO: 750 - DNA, 2807 bp, Homo Sapiens
gagctgacacctccttagcgctggccgcgggccgcctctgcggcagcgctagtcgccttctccgaatcggctccgcacagctaggagaaaagatgttcactgtgctgacccgccaaccatgtgagcaagcaggcctcaaggccctctaccgaactccaaccatcattgccttggtggtcttgcttgtgagtattgtggtacttgtgagtatcactgtcatccagatccacaagcaagaggtcctccctccaggactgaagtatggtattgtgctggatgccgggtcttcaagaaccacagtctacgtgtatcaatggccagcagaaaaagagaataataccggagtggtcagtcaaaccttcaaatgtagtgtgaaaggctctggaatctccagctatggaaataacccccaagatgtccccagagcctttgaggagtgtatgcaaaaagtcaaggggcaggttccatcccacctccacggatccacccccattcacctgggagccacggctgggatgcgcttgctgaggttgcaaaatgaaacagcagctaatgaagtccttgaaagcatccaaagctacttcaagtcccagccctttgactttaggggtgctcaaatcatttctgggcaagaagaaggggtatatggatggattacagccaactatttaatgggaaatttcctggagaagaacctgtggcacatgtgggtgcacccgcatggagtggaaaccacgggtgccctggacttaggtggtgcctccacccaaatatccttcgtggcaggagagaagatggatctgaacaccagcgacatcatgcaggtgtccctgtatggctacgtatacacgctctacacacacagcttccagtgctatggccggaatgaggctgagaagaagtttctggcaatgctcctgcagaattctcctaccaaaaaccatctcaccaatccctgttaccctcgggattatagcatcagcttcaccatgggccatgtatttgatagcctgtgcactgtggaccagaggccagaaagttataaccccaatgatgtcatcacttttgaaggaactggggacccatctctgtgtaaggagaaggtggcttccatatttgacttcaaagcttgccatgatcaagaaacctgttcttttgatggggtttatcagccaaagattaaagggccatttgtggcttttgcaggattctactacacagccagtgctttaaatctttcaggtagcttttccctggacaccttcaactccagcacctggaatttctgctcacagaattggagtcagctcccactgctgctccccaaatttgatgaggtatatgcccgctcttactgcttctcagccaactacatctaccacttgtttgtgaacggttacaaattcacagaggagacttggccccaaatacactttgaaaaagaagtggggaatagcagcatagcctggtctcttggctacatgctcagcctgaccaaccagatcccagctgaaagccctctgatccgtctgcccatagaaccacctgtctttgtgggcaccctcgctttcttcacagcggcagccttgctgtgtctggcatttcttgcatacctgtgttcagcaaccagaagaaagaggcactccgagcatgcctttgaccatgcagtggattctgactgagccttcaaagcagctcctggagtccaatggctgcttagagtcagcctgggtggcaccaggcaatgcaggtgaagtggctgccttcaggaaatacaactaactaaaatcaaacacctaggtcacgtgcctctcaaatactgatttctgccacagcacctcttgaggcatcccttggctattctgtgcatattgttcttcagagacctcactacccacatgctgatctattggggaacagagaagagacaggccacgaaggtcaggctctttatattaagttccccagaggaagagtaagttgagaaggtatcagtttaatgttgaagaattgacctcagggctcagtttccatttccctccctcagtattcttcctggcaagatacccattaagcatttcgccaatcagaatctcattttatagtttttcccattggtctttaactaagactttcttgtagcaatctcgtaagcagtgaaccccctcagatcagtagaatatagtatctgggggagaagacttacttccttcagggcagcagccacagccaggcttctgtcatacaggtagatcccgaagcacagagacataaaaaaggtctcccagaaaactatagaccattctccaagtggaattcccacttagggctctggtcactagattgcaacctgtgtgtttgtcatcatcctcatctcaccattgtattgctatgccctcccataaaaacacattgatccctagcaagattattgcattccagattttactgcctttgctaggcttttgcttagcaaagggctgactttccattgttatcatggtgtatatatttttgtcaccattcccacaagtatacttgatgttgtcatagaacgaacatcctactctatgatttactaaccaattactttcccagatcatagacctctctgcatagtagtcataggtcttgactttggggaaagaaaaggaagctgcaggaatatttatctccaaagtcgaatgagaaagaactccagcaaatccaatggctacaaactaaaaatcagcattatttcatattgctgtttcttagctgaatatggaataaagaactattattttattttgaaaaaaaaaaaaaaa

SEQ ID NO: 751 - protein, 529 aa, Homo Sapiens
MFTVLTRQPCEQAGLKALYRTPTIIALVVLLVSIVVLVSITVIQIHKQEVLPPGLKYGIVLDAGSSRTTVYVYQWPAEKENNTGVVSQTFKCSVKGSGISSYGNNPQDVPRAFEECMQKVKGQVPSHLHGSTPIHLGATAGMRLLRLQNETAANEVLESIQSYFKSQPFDFRGAQIISGQEEGVYGWITANYLMGNFLEKNLWHMWVHPHGVETTGALDLGGASTQISFVAGEKMDLNTSDIMQVSLYGYVYTLYTHSFQCYGRNEAEKKFLAMLLQNSPTKNHLTNPCYPRDYSISFTMGHVFDSLCTVDQRPESYNPNDVITFEGTGDPSLCKEKVASIFDFKACHDQETCSFDGVYQPKIKGPFVAFAGFYYTASALNLSGSFSLDTFNSSTWNFCSQNWSQLPLLLPKFDEVYARSYCFSANYIYHLFVNGYKFTEETWPQIHFEKEVGNSSIAWSLGYMLSLTNQIPAESPLIRLPIEPPVFVGTLAFFTAAALLCLAFLAYLCSATRRKRHSEHAFDHAVDSD

SEQ ID NO: 752 - DNA, 6019 bp, Homo Sapiens
aggcgggccacgagagggcgcagcgcggcgcggcagggattcgcgggcgaccacccggcgcaggagcggccgcgtttcggcctcagaatccattgaagacttgaacaagtgggccctatttcttgtgtctccttttatacttgaagcagaacacatagcatttgtgacggagagcatttgggtacaaagtgagaatttacagagatcatcctcttcagaaacagttcggtttttgcccactagggatgatgtggtttctcatgaggttacttgctctaaaggactttatattttggaaccataagagcacccttgtggcccaggcactttatggatgatcccttttagtgctcccagtaaccttccaagattgtcaagtggtcagactgttgtttgccattagcttgcagacctggggatccttatcggctaattgctgaagcaagtgtggacaacttcagcaagctgggggtggcgttcatggaagatagactccacatggataatggactggtaccccaaaagattgtgtcggtgcacttgcaggactccactctgaaggaagttaaggatcaggtctcaaacaagcaagcccagatcctagagccgaagcctgaaccttctcttgagattaagcctgagcaggacggtatggagcatgttggcagagatgacccaaaggctcttggtgaagaacccaaacaaaggagaggcagtgcctctgggagtgagcctgctggggacagtgacaggggagggggccccgttgagcattatcacctccatctgtctagttgccacgagtgtctggaacttgagaacagcaccattgagtcagtcaagtttgcgtctgccgagaacattccagaccttccctacgattatagcagcagtttggagagtgttgctgatgagacctcccccgaaagagaagggaggagagtcaacctcacgggaaaggcacccaacatcctcctctatgtgggctccgactcccaggaagccctcggccggttccacgaggtccggtctgtgctggccgactgtgtggacattgacagttatattctctaccacctgctggaggacagtgctctcagagacccgtggacggacaactgtctgctgttggtcattgctaccagggagtccattcccgaagacctgtaccagaagttcatggcctatctttctcagggagggaaggtgttgggcctgtcttcatccttcacctttggtggctttcaggtgacaagcaagggtgcactgcacaagacagtccagaacttggttttctccaaggctgaccagagcgaggtgaagctcagcgtcttgagcagtggctgcaggtaccaggaaggccccgtccggctcagccccggcaggctccagggccacctggagaatgaggacaaggacaggatgattgtgcatgtgccttttggaactcgcgggggagaagctgttctttgccaggtgcacttagaactacctcccagctccaacatagtgcaaactccagaagattttaacttgctcaagtcaagcaattttagaagatacgaagtccttagagagattctgacaacccttggcctcagctgtgacatgaaacaagttcctgccttaactcctctttacttgctgtcagctgcggaggaaatcagggatcctcttatgcagtggcttgggaaacatgtggactccgagggagaaataaaatccggccagctctctcttagatttgtttcatcctacgtgtctgaagtagaaataaccccatcttgtatacctgtggtgaccaacatggaggccttctcatcagaacatttcaacttagagatctatcgccaaaatctgcagaccaagcagttggggaaagtaattttgtttgccgaagtgacccccacaacgatgcgtctcctggatgggctgatgtttcagacaccgcaggaaatgggcttaatagtgatcgcggcccggcagaccgagggcaaaggacggggagggaatgtgtggctgagccctgtgggatgtgctctttctactctgctcatctccattccactgagatcccagctgggacagaggatcccgtttgtccagcatctgatgtccgtggctgtcgtggaagcagtgaggtccattcccgagtatcaggatatcaacttacgagtgaagtggcccaacgatatttattacagtgacctcatgaagatcggcggagttctggttaactcaacactcatgggagaaacattttatatacttattggctgtggatttaatgtgactaacagtaaccctaccatctgcatcaacgacctcatcacagaatacaataaacaacacaaggcagaactgaagcccttaagagccgattatctcatcgccagagtcgtgactgtgctggagaaactgatcaaagagtttcaggacaaagggcccaacagcgtccttcccctttattaccgatactgggtccacagtggtcagcaagtccatctgggcagcgcagagggaccaaaggtgtccatcgttggcctggacgattctggcttcctccaggttcaccaggagggcggcgaggttgtgactgtgcacccggacggcaactccttcgacatgctgagaaacctcatcctccccaaacggcggtaatgccgggcgtccccgagacgcggctgcctgtccgtgcccatgcatctggaaatctaatttagagttgtaggtgaattttcttttcctccaattcatttgttaagtctttgttctttttctgtgtttctgtttgtttttaggtttgttttgttgtcgttttctttggtgtttgaagaggctctgggatagatggttaagaagtagaaaatttagtttagggaaagccctcccacaggtgggaaattgctctcccctctgtggcttggacttacgtttattgtcaaggggagtttttacatggaaatgacaatgggaaaattcagatattttcttagtagtgcagacctttacccctagtctatgaaaaaacaaaccaaaatatgctcttgcgcccaggccagtggtgagttagaggtatgctatcactgtttgtaagcatctggggaggtactgaactgtaagaacatgcttggacacttagtcattgttctgtgtttttattaatgaagaaaagggaagacagacttccaagagttactgtccacccggtggtgtggccccatagcgaagtctaaatgcctgtagagatagagctagctggtgtggttgcagtgaccttgtagaggaaatcagttcattactttgacatcattcagtgagctctcctttcctaaggaagtttaaatgtccttagttagggactgactttcttaagtaagtttaaatttactacatattgtgaagagacaggatcaagttcagaatccttaaatgtctgattaggcatcacttggatgaggaggtgggcgatttggctctgacagctggagatgaaggcacactcataccacatacaagggaggatttggagcttttaagccagtttcagatttactctgaaatgtggagcattcctgcaagactgtgcagctcacggaatatagaagacatggcattttactcagaagtcataagtttttgcccccctcatttacctcgtattaccaagaaagaaaatgttatcgatactaaacaccatcagttcagagggaggatgtgtgtgtgtgcccgcatatgtgtgtgcgtgcgtgtgtgcgcacatagctttaaaagaagacattcaaaatttgatgtgctacaagcctcatgaaagaacaaaagaaatgaagccttttgatatgcattcgctattcccagatgtacgccatgccttttccatgtccctcctatctctgttgaacttatgaatcatactcattacttttcagctttttaaaaggccaatttttgtccagttttctctcttccagtcccagctgaaattagtggaaagaaagtttgatggagctttcagctttgaacaaaatcccttcattgtaaactagcaccatctttatccaggtcttacccagtcaggctaattccagaaacttgtggtttttagtatagtctgtctacctttagccaggcacaggacagccctatgaaaaaatacccaatatatattttttggaaatgaaacattaaaagaacttaaaaagtaatttttggaaatgaggcttcaattagaattatttttctcaaaaaacaaacaaacaaaaaacacaaaaaaaaccactcttctccaaatgcccaagccttctttcaaaattagttagaaacttaagtaaaatacaagtccacaccatccccaaattacaaaatggacttacccttgagagggcatctgcagaatatcatcagggacaaagatctcgaggctaacgatgtaggtttcatttctcagactttgtaatataaggcaagccctctctcagagctgccatcatcactttttgaatttctttgggggttatttaatgaaaaacatgctatgttttgttttaagctgaagtcctattctggacactctgctttgggaaaaaatgttatcatttaatttcctttctgcaaattaaaactaatgaagtgtggccttgtcaaaggctatggagatgttccgggcatactgctgtgctctgtgctttccagcaggcgctcctccctcacgcaggagactcagttgtcctgagagagatgaagcagccttgaagcagatgctgcgttttccataaacctgattttgcctcacatgaaccaaagactctcaaaactccgcttctatagaattagctgaataaaggcattttactgatagctgttcgtgttagcgaaacctgtctacctgctatagcacactctccgatttgggccatttatgcaccccgcaacctgggatctcaaggagctttaaagtcttaatgggaacttggcattttcctgatgatctttaaaatgtggtcactaaactcaggattggcgtgtgcttttagaacactggagtagcccttgttttagaggctgtgcattgagtatcgaccgtattttgtaaaaggcaagatatcctcccttccaggctggtaacgggtttcaaggggactcttgaggaagtgccccctaaaatagaacacagcaataactgggcttcctgtccccacccccaccccagcagtgctctctggcactgggaactctgctagggagtggtggaagtaggaaggatttgtgtgcaaaggaaaatcgtggttgagtttcactgcagcaggctgacgttgcctgatgtgagagcaagtggccgactggggtgcgggtgcacaggtcgggggagcacaggccacagagcgcagcctctgggggtcccccaaggcacagcatatacagcatggtcgccccttgccctggagtctgggaacaaagagaggagccagcctccccgcactgcttcagatggaaaagggaggcagggtgggcttccgttctccagatctgtttgctcttaacaggcagaacatgggagaatccttattcctggttaatcactatgcatatttgaaataaaagaaagcgtaagcctctgcaattttaacttctcaaaggatgtctctgaaaagaatcactttaaaccaatgcctataaaaagcaagtctaccaaaataaactaagactttctatgtggtttgggctccctcttatttttacaagtttcatttttaaaagtaggcaactactttgggttacagtatttttattcatatttaaacatttttacaaaataaataaagtgttttacatagtaaggaatatgtacgtatttccaagtattaagaagccaagtgtttttttttttgacgtattattgacaaatgtattcagcgccatacacaagagaaatattattactccaaagaacgaaagttaacaaaactccaaagcaaaaacccttttaatggaggtgagaaataaatttaatgtaacaaca

SEQ ID NO: 753 - protein, 726 aa, Homo Sapiens
MEDRLHMDNGLVPQKIVSVHLQDSTLKEVKDQVSNKQAQILEPKPEPSLEIKPEQDGMEHVGRDDPKALGEEPKQRRGSASGSEPAGDSDRGGGPVEHYHLHLSSCHECLELENSTIESVKFASAENIPDLPYDYSSSLESVADETSPEREGRRVNLTGKAPNILLYVGSDSQEALGRFHEVRSVLADCVDIDSYILYHLLEDSALRDPWTDNCLLLVIATRESIPEDLYQKFMAYLSQGGKVLGLSSSFTFGGFQVTSKGALHKTVQNLVFSKADQSEVKLSVLSSGCRYQEGPVRLSPGRLQGHLENEDKDRMIVHVPFGTRGGEAVLCQVHLELPPSSNIVQTPEDFNLLKSSNFRRYEVLREILTTLGLSCDMKQVPALTPLYLLSAAEEIRDPLMQWLGKHVDSEGEIKSGQLSLRFVSSYVSEVEITPSCIPVVTNMEAFSSEHFNLEIYRQNLQTKQLGKVILFAEVTPTTMRLLDGLMFQTPQEMGLIVIAARQTEGKGRGGNVWLSPVGCALSTLLISIPLRSQLGQRIPFVQHLMSVAVVEAVRSIPEYQDINLRVKWPNDIYYSDLMKIGGVLVNSTLMGETFYILIGCGFNVTNSNPTICINDLITEYNKQHKAELKPLRADYLIARVVTVLEKLIKEFQDKGPNSVLPLYYRYWVHSGQQVHLGSAEGPKVSIVGLDDSGFLQVHQEGGEVVTVHPDGNSFDMLRNLILPKRR

SEQ ID NO: 754 - DNA, 2689 bp, Homo Sapiens
gacttcctgatttgcaagaaggtgcaggagccgcagcgggcggccccggtcgcaggaactgagaggcctcagctttggtggcggctaccggcggagacgggggcggcggccacgccaccgctgctgtcacagaaaggctctggtgggtggggtgggaggcggggaagtgccgggggcgcagccgacatgggcccgccgccacggctgctgtgagcagcctctttccctgtgtggccgccggcgtgggcggggacggcgcgaccctcgcgcggccgggctgcgggcttccaggccagcgcgcgggggccggacggacagccccacaccgacatgtaaccatggactgcaggaccaaggcaaatccagacagaacctttgacttggtgttgaaagtgaaatgtcatgcctctgaaaatgaagatcctgtggtattgtggaaattcccagaggactttggagaccaggaaatactacagagtgtgccaaagttctgttttccctttgacgttgaaagggtgtctcagaatcaagttggacagcactttacctttgtactgacagacattgaaagtaaacagagatttggattctgcagactgacgtcaggaggcacaatttgtttatgcatccttagttaccttccctggtttgaagtgtattacaagcttctaaatactcttgcagattacttggctaaggaactggaaaatgatttgaatgaaactctcagatcactgtataaccacccagtaccaaaggcaaatactcctgtaaatttgagtgtgcattcctacttcattgcccctgatgtaactggactcccaacaatacccgagagtagaaatcttacagaatattttgttgccgtggatgtgaacaacatgctgcagctgtatgccagtatgctgcatgaaaggcgcatcgtgattatctcgagcaaattaagcactttaactgcctgtatccatggatcagctgctcttctatacccaatgtattggcaacacatatacatcccagtgcttcctccacacctgctggactactgctgtgccccaatgccatacctgattggaatacactccagcctcatagagagagtgaaaaacaaatcattggaagatgttgttatgttaaatgttgatacaaacacattagaatcaccatttagtgacttgaacaacctaccaagtgatgtggtctcggccttgaaaaataaactgaagaagcagtctacagctacgggtgatggagtagctagggcctttcttagagcacaggctgctttgtttggatcctacagagatgcactgagatacaaacctggtgagcccatcactttctgtgaggagagttttgtaaagcaccgctcaagcgtgatgaaacagttcctggaaactgccattaacctccagctttttaagcagtttatcgatggtcgactggcaaaactaaatgcaggaaggggtttctctgatgtatttgaagaagagatcacttcaggtggcttttgtggagggaacccgaggtcatatcaacaatgggtgcatacagtcaagaaaggaggtgcactgttcaacacagcaatgaccaaagcaacccctgctgtacggacagcatataaatttgcaaaaaatcatgcaaagctgggactaaaggaagtgaagagtaaactaaaacacaaggaaaatgaagaagattatgggacctgttctagttctgtacaatatacaccagtttacaaattacacaatgaaaagggaggaaactcagaaaagcgtaagcttgctcaggcacgcttaaaaaggcctcttaagagccttgatggtgctctatatgatgatgaagatgatgatgacattgaaagagcaagcaagttatcttctgaagatggtgaagaagcttctgcttatctctatgagagtgatgactctgttgaaacaagagtgaagactccttactcaggtgaaatggacttactaggagagattcttgatacattgagcacacacagctcagatcaggggaagctggcagctgcaaagagcttggatttctttagatcaatggatgacattgattacaaacctacgaataaatctaatgctcctagtgagaataacctggctttcctctgtggtggttctggtgaccaagcagagtggaatcttgggcaagacgatagtgccctccatggcaaacacctccctccatctcctaggaagcgggtttcctctagtggtttgacagattctctgtttatcctgaaagaggaaaacagtaacaagcacctcggtgctgacaatgtgagtgaccctacttcaggactggatttccaactcacttcccctgaagtttcccagactgataaaggaaaaacagaaaagagggaaacactaagccagatttcagatgatctgcttatacccggtcttgggcggcattcatcgacttttgttccttgggagaaagaagggaaagaagccaaagagacttcagaagatattggactgctccatgaagtagtgtcattatgtcatatgacatctgacttccaacaaagcttgaacatttcagacaaaaacacaaatggaaaccaaacttaaatcttgcatccaagcttctatggagacattttgagattcaatgcaatctgtataataaacagaattatttgtaggaatggcaa

SEQ ID NO: 755 - protein, 755 aa, Homo Sapiens
MDCRTKANPDRTFDLVLKVKCHASENEDPVVLWKFPEDFGDQEILQSVPKFCFPFDVERVSQNQVGQHFTFVLTDIESKQRFGFCRLTSGGTICLCILSYLPWFEVYYKLLNTLADYLAKELENDLNETLRSLYNHPVPKANTPVNLSVHSYFIAPDVTGLPTIPESRNLTEYFVAVDVNNMLQLYASMLHERRIVIISSKLSTLTACIHGSAALLYPMYWQHIYIPVLPPHLLDYCCAPMPYLIGIHSSLIERVKNKSLEDVVMLNVDTNTLESPFSDLNNLPSDVVSALKNKLKKQSTATGDGVARAFLRAQAALFGSYRDALRYKPGEPITFCEESFVKHRSSVMKQFLETAINLQLFKQFIDGRLAKLNAGRGFSDVFEEEITSGGFCGGNPRSYQQWVHTVKKGGALFNTAMTKATPAVRTAYKFAKNHAKLGLKEVKSKLKHKENEEDYGTCSSSVQYTPVYKLHNEKGGNSEKRKLAQARLKRPLKSLDGALYDDEDDDDIERASKLSSEDGEEASAYLYESDDSVETRVKTPYSGEMDLLGEILDTLSTHSSDQGKLAAAKSLDFFRSMDDIDYKPTNKSNAPSENNLAFLCGGSGDQAEWNLGQDDSALHGKHLPPSPRKRVSSSGLTDSLFILKEENSNKHLGADNVSDPTSGLDFQLTSPEVSQTDKGKTEKRETLSQISDDLLIPGLGRHSSTFVPWEKEGKEAKETSEDIGLLHEVVSLCHMTSDFQQSLNISDKNTNGNQT

SEQ ID NO: 756 - DNA, 8662 bp, Homo Sapiens
gtgcacgccgcagtgccggggactcggcggggcgccggccggcgggcggagaccgactcgggatctgtccgagcaggaagccagcctcagcccggccgctgtcgccgccctgtcctggtgcccgtccgcgtcgtcgccctcttcactggccctcatcacttctcaccgcgccctccagcttcacccgtacaggtagccccgccgccgcgcacctgccttcgctcccgcaccggtgacagtggatagtggaaacaggagatcgtggatcctccttcaaaaatggaggatggaaagcccgtttgggcgccacaccctacagatggatttcagatgggcaatattgtggatattggccccgacagcttaacaattgaacccttgaatcagaaaggcaagacatttttggctctcataaaccaagtgtttcctgcagaagaggacagtaaaaaagatgtggaagataactgttcactaatgtatttaaatgaagccacactgctccataatatcaaagttcgatatagtaaagacagaatttatacatatgtcgccaacattctgattgcagtgaatccatactttgacatacctaaaatatattcttcagaagcaataaagtcatatcaaggaaaatctcttgggacaagaccacctcatgtctttgcaattgctgataaagcttttcgagacatgaaggtgctcaagatgagtcagtctatcattgtatctggagaatcaggagccggcaaaacagaaaatacaaaatttgttctaagatacctgactgaatcctatggaacaggtcaagatattgatgacagaattgttgaagctaacccactcctagaagcctttggaaatgcgaagactgttcgcaacaataatagcagtcgatttgggaaatttgtagaaatacattttaatgaaaagagctcagttgttggaggatttgtttcacattatctcctagagaaatctaggatctgtgttcaaggcaaagaggaaagaaattatcatatcttttataggttgtgtgctggtgcttctgaagatattagagaaaaacttcatttgagttcaccagataattttcggtatttaaaccgaggctgcactagatactttgctaacaaagaaactgacaaacagattttacagaaccgcaaaagtcctgagtaccttaaggcaggttctatgaaagatcctctgctagatgaccatggtgattttattagaatgtgcacggctatgaaaaaaattggtttggatgatgaagaaaagcttgatctcttccgggtagtagctggcgtcctgcaccttggaaatattgattttgaggaagctggcagcacttcaggtggttgtaatctgaagaataaatctgctcagtctttggaatattgtgctgaattactgggtttggaccaagatgatcttcgagtaagtttgaccacaagagtcatgctaacaacagcagggggcaccaaaggaacagttataaaggtacctctgaaagtggagcaagcaaacaatgctcgtgatgccctggcaaagacagtgtatagccatctttttgatcatgtggtaaacagagtaaatcagtgttttccttttgaaacatcatcctattttattggagtcctagatattgctggttttgagtactttgagcataacagttttgaacaattttgcatcaactattgcaatgaaaaacttcaacaattttttaatgaaaggattctgaaggaggaacaagaactctatcaaaaagaaggtttaggtgttaatgaagtgcattatgtggataatcaggactgtatagatttaattgaagccaaattagtgggaatactggatattttggatgaagaaaatcgccttccccagccaagtgatcaacactttacatctgcagttcaccaaaagcacaaggatcattttcgactcactattcccagaaaatctaagctggcagttcataggaatatcagagacgacgaaggcttcattatcaggcattttgcgggggcagtgtgctatgaaacaacccagtttgtggagaaaaataatgatgctttacatatgtctcttgaatccttaatatgtgaatccagagataagtttatacgggaattatttgaatcatccacaaataacaacaaagatactaaacaaaaagcaggaaaacttagcttcatcagcgtgggaaacaagtttaagacacagttaaatttgcttctggataaacttcgaagtactggagcaagctttattcgttgcatcaaacctaacttaaagatgacaagccaccactttgaaggtgctcaaattctgtctcagcttcagtgttcagggatggtgtctgttttggacttgatgcagggtggttacccatcacgagcttcatttcatgaactctacaacatgtacaaaaagtatatgccagataaacttgcaagattggatccaagactattttgtaaggctttgtttaaagctttgggcttaaatgaaaatgactacaagtttgggttaaccaaagtattttttagacctggcaagtttgcagaatttgatcagatcatgaagtctgaccctgaccacttagcagagttggttaaaagagtcaatcactggctcacatgcagtcgctggaagaaagttcagtggtgctcactctcagtcatcaaattgaaaaacaaaataaaatatcgagctgaagcctgcattaaaatgcaaaaaactattcgaatgtggctttgcaagaggagacacaaacctcgcattgatggtctggttaaggtgggcacactgaaaaaacgacttgataaatttaatgaggtagtcagtgtgttgaaagatggaaaacccgagatgaataaacagatcaagaatctggaaatttctattgatactttgatggccaaaattaagtccactatgatgacgcaggaacaaatccagaaagaatatgatgcactggttaaaagctcagaggaactcctcagtgcattacagaaaaaaaaacagcaggaagaggaagcagaaaggctgaggcgtattcaagaagaaatggaaaaggaaagaaaaagacgtgaagaagacgaaaaacgtcgaagaaaggaagaggaggaaaggcggatgaaacttgagatggaagcaaagagaaaacaagaagaagaagagagaaagaaaagggaagatgatgaaaaacgcattcaagctgaagtggaggcacagctggcccgacagaaggaggaggaatcccaacagcaagcagttctggagcaggagcgcagggaccgggagctggccctgaggattgcccagagtgaagccgagctcatcagtgatgaggcccaggccgacctggcgctgcggagaaatgatggaacaagacccaaaatgacaccggaacaaatggccaaagaaatgtcagaatttttgagtagaggtcctgctgtactagccaccaaagcagctgctggtactaagaaatatgatcttagtaaatggaaatatgcagaactacgtgataccatcaatacttcttgtgatattgagctcctggcagcttgcagagaagaatttcataggagactaaaagtgtatcatgcttggaaatctaagaacaagaagagaaatactgaaacagagcaacgtgctccaaagtctgttactgattatgattttgcaccatttttgaacaattcacctcagcaaaacccagcagctcagattcctgccaggcagcgggagattgaaatgaaccgacagcaacgcttcttccgcatcccattcatccgccctgccgaccagtacaaagaccctcagagtaagaaaaaaggctggtggtatgcccattttgatggaccatggattgcccggcaaatggaactccatcctgacaagccacccatcctacttgtggctggtaaggacgacatggagatgtgtgagctgaatcttgaggagactggcctgactcggaagcgtggtgctgagatcttgccaagacagtttgaagaaatctgggaacgctgtggaggcatccagtaccttcagaatgcgattgagagcagacaggctcggcccacctatgcaacagccatgctgcagagtctgttaaagtagatgttgcacaccagccttacagctgggagcctttgccatggtacttaggtagggtgtgtgcccccagatttaaccattccataatcatgttagagttacttctataaagtgaacagattttattaatcacggcttttggtgaatttgtttaaggttaattatggtagcaaattttggacctaaacattatttttctgtatcccgctgtaattcccaaaactctcattattctctaactattacacatgggcatattctgatgtttctcatcctttgccagaagactaccttacatccatcgtaattgttctctaggaaaagagaacttttttcaaaattcaaaatactttttaaggatggcacagtaccatataactggagtaataaaacatgagcttacattcttacaataactaaaccacttaaaatgatcaaggcactaatgttttggtctgaaaagctgtgtactttatagacattttcagacatttttggaaatttccattaaaggtggaaaatctatttttttcctcctttgcagtgtcttagtttgaatgaaacacttcgaagttctagaattctagaaagagccttaatgtatttgatgtattctgtgataagaggtactaatagtatccagcacagatttgcttttctttgctagcacaatgtgtgttgctgtcagaatattctttttatattctgtggaaaaataaaggaaattcagattgtttaaatgcctaaaagttttgagataagttttgtttcaattagaaaaggaaataggttttaggtggcatagtggcttaactggactgaattcaaatattctttcaacttcatctcaatagtgatttttgtatcagaatcttgtccaagttgtttcattgatttagtaagtgttctgcttccaacatctttctttttaagaaattcctagtgtcttttttggcctttgaggttttggtaattgtagacctgtttcataagctttgtaattcagaaatccttgtatttagtaagtgcttgttttacataactgataattttaaaatgttttctttgtgtgctgttagtattgattcaaatgtcagcagctttaagcctaatatttatgactttcacatttggaatttaaagacaaaaatacatcaaggagttatgctgacataattctaaggagttttgttgtattttagaataaaattataaagtaaaatgattctctgtactgctttttcccccagtttttagagaccctaacctttgaaatgaaattccagtgatttcttttttccctagaaagattacctcagttagggaagtatttcccagctgactagtgtttgtgagccacagacactgtcttcagaattgcttctctcatgtcttagtagagaaatatttatttattatgatacattcaaatgattgtcaagttaaattaaatggttgtgtctgtgctattgagaatgcaaatgtgattatcttttgaaggctgtattactgcatagcttcacccaccctcgggtcatttcgtccctgtgattggggacagaaggtgtagctactgaagtaaatgacctattctctctcttccatctctcgcctttaactggtgtttttatttgtgtaggatagtgaatgataagcttttttcctaaccagtagtgagtaaagttcttgaacaaaatttagtagccaaattgttttttaatgacatgtctctttagtacaatagttttgtgtatcttttagatacattaataggcactagatggaaaattaaagagttaaacatatttaaatgagagaatctaatgtttcagaaatttgtaagaaatgtatcacagcaaagggttgttataagtccttagtttttgactctaatagttaatacaattatagttaatcttaagccataatgtttctaatcatgtcacacagctgtcctagaacttatctatttaaaatagtttcctgagttaattttggccagcagggcaactgccctaattcagatagatttacagtaacctacgtacagtagatgcacatacacacagacacccctttgctggagaaacttaggaccctgtcagccttttaaaggaaacagcaggagtggtgtcctaaatgatgttcatgcagctgctttaccatgttcacagtcaagcccatgcatgccaggttaaaactgtggaaatcaaaagtaaattcactcatattttaatcattttaactgagatttaaaattagaagtttaaaccactatatataaagaactaatcttttcttaataccagttctttccatagcatatgctttgcaaaggcagcatgcataaaatatttaaaatgagaggacagaatgttttcacatttgattcaattttaatataattcctaattgtggtaacacagttgagatatgtattatgagttatgggaactaattgagaaaaggaagttactctaatccacgtatgttaagagaatattgagttttcttagttgtaaagttggggagatggcaccttctcagaggattgtgaaaatatgaggaagaaacaaaacagtgcatgtaggagcacagggccacacaaaggcattctattgttatgctcattctgcttctgtaatgacttttcataggtcattcttgtgaaccattttgttttgcaagcaaccaaggaaagaacatcttaagtggaaaatcagtggtggttgtgaacacttagagaatagcaatccacaggcaagaataatggtattgtttgtagagctttattaattggatattttttaaaagacattttcattcacaggtcattactatggttctcagcgatccaaatatgtagatcattggtttttttttttacctgaagtagcttaagagtacttggatcagtagaataaatatttattgaatcaatcagtcagccaattaatatgatgttagtgatagacctgcctccttttatggaagaggtaacagatccagagaggtcaagtaatttagttgtagactgaaaaatatatcaaagcctttgctgcaatcatatgtaacaaaaagaaccaaaacaaacactttttagtggcacctgtggatttacaaagggttgcctctctgtcattccacaacttcagaaggtgtgacaggttttccctatttatcattaccaataataacaagtattgagagttttaaaatttctcccagaagataaactaacaaggatggaaggggagggcaaaggatatctaaacatgagaataaggacatgttagagggggggaaacagttgtaacaataaggaaagagaagagcaacagtggaagagacaggttgtgtgcccctaaagattctgcacccccagtttggaaacactgatacattttaggacacagagcactcctagatctctacgaaattttagaatgaataatgtgtaatttataggatcagaacgtatggttattaaaacttggatcaagatatgcccggtgtatacattcttagcacataggaatggcactgccatactggagaaggtcagcagtaaataggcattctgtacataagcctcatggaagggtaagatggagagactggcagaagtagcacctactctgctgggagcacttctctgagtacgctttagttcaattcaaatcactgtattctttccccattgctaacctaatatatgaaacaagcttagctgtctcagaagtttttcaagagatgatcaggaaaaattaatgcacattcaaaaggagaatcttcagtacaaatttgtttttttaaaaatagatttagggctgggcgcggtggctcacgcctgtaatcccagcactttgggaggccgaggcgggtggatcacgaggtcaagacttcgagaccagcctggccaacatggtgaaaccctgtctctactaaaaatacaaaacattagccaggcgtggtagtgggtgcctgtaatccctgctacttgggaggctgaggcaggagaatcacttgaacgcgggaggcagaggttgcagggagccgagatggcgccattgcactccatcctgggcaacaagagcgaaattccatctcaaaaaataaaatagatttagggggtacaagtgcagttttgttacatgggtatattgcatagtggtaaaatgtgggcttttagtgtacctaacacccagagaagcatacattgtgcccagtaggtaatttttcatccctaaaccttttctcagcctcccactttctggagtctccaatgtcggttattccactctttatgtccatatctacacattcaatcctaatttgtaccaagtagcatctcacctttaaatcacaggcttattagttgggtgttttctttttacttatgaaaattcatctagtcaaactgtcaattaatttttcctcatttcattaaaagtgtatatctaatgctttctctaaaaattgatgtactggaaatacaaataaataaatgctccctgtgtagaatttc

SEQ ID NO: 757 - protein, 1285 aa, Homo Sapiens
MEDGKPVWAPHPTDGFQMGNIVDIGPDSLTIEPLNQKGKTFLALINQVFPAEEDSKKDVEDNCSLMYLNEATLLHNIKVRYSKDRIYTYVANILIAVNPYFDIPKIYSSEAIKSYQGKSLGTRPPHVFAIADKAFRDMKVLKMSQSIIVSGESGAGKTENTKFVLRYLTESYGTGQDIDDRIVEANPLLEAFGNAKTVRNNNSSRFGKFVEIHFNEKSSVVGGFVSHYLLEKSRICVQGKEERNYHIFYRLCAGASEDIREKLHLSSPDNFRYLNRGCTRYFANKETDKQILQNRKSPEYLKAGSMKDPLLDDHGDFIRMCTAMKKIGLDDEEKLDLFRVVAGVLHLGNIDFEEAGSTSGGCNLKNKSAQSLEYCAELLGLDQDDLRVSLTTRVMLTTAGGTKGTVIKVPLKVEQANNARDALAKTVYSHLFDHVVNRVNQCFPFETSSYFIGVLDIAGFEYFEHNSFEQFCINYCNEKLQQFFNERILKEEQELYQKEGLGVNEVHYVDNQDCIDLIEAKLVGILDILDEENRLPQPSDQHFTSAVHQKHKDHFRLTIPRKSKLAVHRNIRDDEGFIIRHFAGAVCYETTQFVEKNNDALHMSLESLICESRDKFIRELFESSTNNNKDTKQKAGKLSFISVGNKFKTQLNLLLDKLRSTGASFIRCIKPNLKMTSHHFEGAQILSQLQCSGMVSVLDLMQGGYPSRASFHELYNMYKKYMPDKLARLDPRLFCKALFKALGLNENDYKFGLTKVFFRPGKFAEFDQIMKSDPDHLAELVKRVNHWLTCSRWKKVQWCSLSVIKLKNKIKYRAEACIKMQKTIRMWLCKRRHKPRIDGLVKVGTLKKRLDKFNEVVSVLKDGKPEMNKQIKNLEISIDTLMAKIKSTMMTQEQIQKEYDALVKSSEELLSALQKKKQQEEEAERLRRIQEEMEKERKRREEDEKRRRKEEEERRMKLEMEAKRKQEEEERKKREDDEKRIQAEVEAQLARQKEEESQQQAVLEQERRDRELALRIAQSEAELISDEAQADLALRRNDGTRPKMTPEQMAKEMSEFLSRGPAVLATKAAAGTKKYDLSKWKYAELRDTINTSCDIELLAACREEFHRRLKVYHAWKSKNKKRNTETEQRAPKSVTDYDFAPFLNNSPQQNPAAQIPARQREIEMNRQQRFFRIPFIRPADQYKDPQSKKKGWWYAHFDGPWIARQMELHPDKPPILLVAGKDDMEMCELNLEETGLTRKRGAEILPRQFEEIWERCGGIQYLQNAIESRQARPTYATAMLQSLLK

SEQ ID NO: 758 - DNA, 4651 bp, Homo Sapiens
agagagtgcctcgcgtagggagcacgaggagaaggaggagcttcgcaggttgttttttcccaggaggccgactccgccgagtcggtggcggctgcaggctgggagggagaagtgctacgcctttgcaggttggcgaagtggttccaggctacccggctagtctggcacggccccgtcttctgcctcctcctccgtcgcgtggcggcgggaactgttggccgcgcggcctcgggaacggcccaggtccccgcccgcaggtcccgggcagataacatagatcatcagtagaaaacttcttgaagttgttcaagaaaaatttgaaagtagcaaaatagaaaataaagaattaacagcagatacagaggacagcatggaagtgttgtcttaggaaacagaacacagcagtgaaaaaacagacaaaatccgctcagatacaactgcagctgataatgttttccggcttcaatgtctttagagttgggatctcttttgtcataatgtgcattttttacatgccaacagtaaactctttaccagaactgagtcctcagaaatattttagtacattgcaaccaggaaaagcctctttagcttatttttgtcaagctgattccccaagaacatctgtatttcttgaagaactgaatgaggctgttagacctctgcaggactatggaatttcagttgccaaggttaattgtgtcaaagaagaaatatcaagatactgtggaaaagaaaaggatttgatgaaagcatatttattcaagggcaacatattgctcagagaattccctactgacaccttgtttgatgtgaatgccattgtcgcccatgttctctttgctcttctttttagtgaagtgaaatatattaccaacctggaagaccttcagaacatagaaaatgctctgaaaggaaaagcaaatattatattctcatatgtaagagccattggaataccagagcacagagcagtcatggaagccgcttttgtgtatgggactacataccaatttgtcttaaccacagaaattgcccttttggaaagtattggctctgaggatgtggaatatgcacatctctacttttttcattgtaaactagtcttggacttgacccagcaatgtagaagaacactaatggaacagccattgactacactgaacattcacctgtttattaagacaatgaaagcacctctgttgactgaagttgctgaagatcctcaacaagtttcaactgtccatctccaactgggcttaccactggtttttattgttagccaacaggctacttatgaagctgatagaagaactgcagaatgggttgcttggcgtcttctgggaaaagcaggagttctactcttgttaagggactctttggaagtgaacattcctcaagatgctaatgtggtcttcaaaagagcagaagagggagttccagtggaatttttggtattacatgatgttgatttaataatatctcatgtggaaaataatatgcacattgaggaaatacaagaagatgaagacaatgacatggaaggtccagatatagatgttcaggatgatgaagtggcagaaactgttttcagagataggaagagaaaattacctttggaacttacagtggaactaacagaagaaacatttaatgcaacagtgatggcttctgacagcatagtactcttctatgctggttggcaagcagtatccatggcatttttgcaatcctatattgatgtggcagttaaactgaaaggcacatctactatgcttcttactagaataaactgtgcagattggtctgatgtatgtactaagcaaaatgttactgaatttcctatcataaagatgtacaagaaaggcgagaacccagtatcttatgctggaatgttaggaaccgaagatctcctaaaatttatccagctcaacaggatttcatatccagtgaatataacatcgatccaagaagcagaagaatatttaagtggggaattatataaagacctcatcttgtattctagtgtgtcagtattgggactatttagtccaaccatgaaaacagcaaaagaagattttagtgaagcaggaaactacctaaaaggatatgttatcactggaatttattctgaagaagatgttttgctactgtcaaccaaatatgctgcaagtcttccagccctgctgcttgccagacacacagaaggcaaaatagagagcatcccactagctagcacacatgcacaagacatagttcaaataataacagatgcactactggaaatgtttccggaaatcactgtggaaaatcttcccagttatttcagacttcagaaaccattattgattttgttcagtgatggcactgtaaatcctcagtataaaaaagcaatattgacactggtaaagcagaaatacttggattcatttactccatgctggttaaatctaaagaatactccagtggggagaggaatcttgagggcatattttgatcctctgcctccccttcctcttcttgttttggtgaatctgcattcaggtggccaagtatttgcatttccttcagaccaggctataattgaagaaaaccttgtattgtggctgaagaaattagaagcaggactagaaaatcatatcacaattttacctgctcaagaatggaaacctcctcttccagcttatgattttctaagtatgatagatgccgcaacatctcaacgtggcactaggaaagttcccaagtgtatgaaagaaacagatgtgcaggagaatgataaggaacaacatgaagataaatcggcagtcagaaaagaaccgattgaaactctgagaataaagcattggaatagaagtaattggtttaaagaagcagaaaaatcatttagacgtgataaagagttaggatgctcaaaagtgaactaattttatagggctgtggtttccaaaatttttttggcatgatagacttaatttatttccttaaagaataatattaaatcatttcaagtttgcagactagtgccatccaatagaattataatataagtcacatattttatttaaaattttctagtaactacattaaacaaagtaaaagtgagcagggcaaaataattttgatattacttttcacccagtagtatacccaaaatagcgaaatatagaaattattaatgagatattttacatccttttttgtaccaagtcttctaaatgcagtacatattttatacttactgcatttcttacttccgagtagccatatttcaagtgttccttgccacatgtggcctgtgactactgtattggacagttcagtactagacaaaaactagcataattaacttagttctagccatgatttctatttggattaaaattaaactctaatcacagttaactccacagtgcattcatgcagctgacagttatatttgttttattggagtcatgatattaaaatcagcgtttgtcaacctcaggggatatttagcaattgtcgggagacatttttgatgtcatgactagggcagttattgacatttagtgagtagaggccagggatcctgctaaataacctgcattggacagcgccccacaacaaagaattatcctgcccgaaatggtagtcgtgccaaggctgagtaaccttgtgttaaaagtaacctgtggcagactaggtttccagaatttcctggttctgctcacgtatcatgtttgaaaaaattttggctattaaagatatgtattagatggtcttatcctgattattacctggatacaacttgatcttttctaatattttcagaaagtgatgggataaccctagaagaggactcagaatgatatttatattttaagtgagtcttaaaacctcctcttatttctacaagttatatggctaaatttcagattgaacagggattcagcattctgccatctcctcatggaaagagaggctccctcatctgaagcgtctctgaaatctacccttgcaagcttcagacaaatcagttgatctccctgagccacacggcctcattctgtgagggagggaaagattagccaaagagttaattttcattccaaatcacttagctgttagactgatctgtttgtagcagttgtttgtctcatttttgctctgtgcattttttgagacatttgttgagaatattctatttggtgctctactgtatttttctttttaatatctacttgatatcttgttctttaaattttcttcacatatggtttgcctgatacaactgatttttataactgaaatttaaggaatctaacagctaaaactcagtaagtgcatatatttccttataacatagacccgttgctactctcagcaccctctcctcaattttttttcctgtagcatgtgatgcctgattaaactcattttcatttgcttttatttctaatatgggaacaatgagagtgaactctaaatataggttgtagtaataaaacatcattagcctaattattagaaaatgctaattaagtaccagcacatagaaacatgaaattgcttagtcattgtacctttgtcagcaattttgacagtcattaatgtttgtcataattttaaataaagtgtctgggtttcagaataccttcaaaaaaaaaaa

SEQ ID NO: 759 - protein, 825 aa, Homo Sapiens
MFSGFNVFRVGISFVIMCIFYMPTVNSLPELSPQKYFSTLQPGKASLAYFCQADSPRTSVFLEELNEAVRPLQDYGISVAKVNCVKEEISRYCGKEKDLMKAYLFKGNILLREFPTDTLFDVNAIVAHVLFALLFSEVKYITNLEDLQNIENALKGKANIIFSYVRAIGIPEHRAVMEAAFVYGTTYQFVLTTEIALLESIGSEDVEYAHLYFFHCKLVLDLTQQCRRTLMEQPLTTLNIHLFIKTMKAPLLTEVAEDPQQVSTVHLQLGLPLVFIVSQQATYEADRRTAEWVAWRLLGKAGVLLLLRDSLEVNIPQDANVVFKRAEEGVPVEFLVLHDVDLIISHVENNMHIEEIQEDEDNDMEGPDIDVQDDEVAETVFRDRKRKLPLELTVELTEETFNATVMASDSIVLFYAGWQAVSMAFLQSYIDVAVKLKGTSTMLLTRINCADWSDVCTKQNVTEFPIIKMYKKGENPVSYAGMLGTEDLLKFIQLNRISYPVNITSIQEAEEYLSGELYKDLILYSSVSVLGLFSPTMKTAKEDFSEAGNYLKGYVITGIYSEEDVLLLSTKYAASLPALLLARHTEGKIESIPLASTHAQDIVQIITDALLEMFPEITVENLPSYFRLQKPLLILFSDGTVNPQYKKAILTLVKQKYLDSFTPCWLNLKNTPVGRGILRAYFDPLPPLPLLVLVNLHSGGQVFAFPSDQAIIEENLVLWLKKLEAGLENHITILPAQEWKPPLPAYDFLSMIDAATSQRGTRKVPKCMKETDVQENDKEQHEDKSAVRKEPIETLRIKHWNRSNWFKEAEKSFRRDKELGCSKVN

SEQ ID NO: 760 - DNA, 3669 bp, Homo Sapiens
gcgaggccccaagctggcccgggagaggactctgcgggcgaagtggctgcgcaaggagagaacttttcctgcacaaggaacgcctcgtggggagacccaaggcaggagcggtccggagccggctgcggcgtgtgcggccggccttgggacagcgatcgccgcgggtggcaacagagagccccaagcaaaagtgggagcaggagcttggaggtgagcacaggaagccccacttgaggcttttacgcagcctctagtctctgtttcttctggaataggcaagtgtcctttcaactctaagagaccagcagaggccactgtcccttaagactgccggagtcctcaccacttctccaggattccagaggagactgtggcgatggtgaatgaaggtcccaaccaggaagagagcgatgacacccctgtgccggagtccgcactccaagcggaccccagcgtctcggtccatcccagcgtctcggtccatcccagcgtctccatcaaccccagcgtctctgtccaccccagcagttcggcccaccccagtgccttagcccaacccagtggcttggctcaccccagtagctcgggccctgaggacctcagcgtgatcaaggtgagcaggcgccgttgggccgtggtcctggtgtttagctgctactccatgtgcaactcctttcagtggatccagtacggctccatcaataacatcttcatgcacttctacggtgtcagtgcctttgccattgactggctgtccatgtgctacatgctgacttacatccctctgctcctgccagtggcttggctgctggagaagttcggcctgcgcaccattgctctcactggctcggctctcaactgcctgggggcctgggtgaagctgggcagcctgaagccgcatctctttccggtcaccgtggtgggccagctcatctgctctgtggcccaggttttcatcctgggcatgccctcccgcatcgcttccgtctggttcggggctaatgaggtttcaacagcctgctccgtggctgtctttggcaatcagcttggaattgcgattgggttcttggtccctcctgttttggtacccaacattgaagaccgggacgagcttgcctaccacatcagcatcatgttctatataataggaggtgtggccactctcctcctcatccttgtcatcattgtgttcaaggagaaacctaaatatccccccagcagggcccaatccctgagctatgccttgacctctcctgatgcctcatacttaggttccatcgcccggctcttcaaaaatctcaactttgtgctgcttgtcatcacctatggtctgaatgctggtgctttttatgccttgtccactcttctgaatcgcatggtgatctggcactacccgggggaagaagtgaatgctggaagaattggcctgacgatcgtcattgcaggaatgcttggggctgtgatctcaggaatctggctggataggtccaaaacctacaaagagacaaccctggtagtctatatcatgacactggtgggcatggtggtgtacacgtttaccttgaacctgggacacctgtgggtagtgttcatcactgctggcacaatgggcttctttatgactggctatctcccactgggatttgagtttgctgtggagctcacgtacccagaatcagaaggcatctcctccggcctcctcaacatatctgcacaggtatttgggatcatctttaccatctcccagggccagattattgacaactatggaaccaagcctgggaacatcttcctgtgtgtgttccttactcttggagcagccctcactgcattcattaaggcagatctccggagacagaaagcaaacaaagaaactcttgagaacaaactccaagaggaggaggaggagagcaacaccagcaaagtgcccactgctgtgtcagaggatcatctctgagaggaaggtggtgacaactcagggaacacgaacaccccaccttttccttcagcacagctctcaccgccagcacaaagggcttcgctagagatgtttttggagggaatcagtgggactatttgtggcatggatggcctattcctcctagaacccacgtaagagcttggatgatttagttggagaaaattgcacctatcaccaaatgcaaatttgattcccacctccacccccttttaggttatgggagttggtgttgggacagggtggcagagaatattggagtcaatcctagcttggtctcttgccttccctcttttcctccatccatcgtggacaatgcctgcaaaattttcacaggaagaaagcctattcaggatattaacttgaaatttccagtgtcctaagagcctctcatgaagcccagttctaataagtggcaagctgctctgccggggtcatctcctgggtcatcggactgattgctcaagttctgcaggagaggaagcaccattagaacaactccatcagaacagctccaccgggacttgtgggcctaaattttcctggcctaacgggtctgtctccaaaccctctttcctaagagctgagcaaaccaaccataataaacttgacaaaagactttgttgtggccatgacagagataccgactcaggagggctacctacctaggtgtgatcatgctgggggctaccttctgagtatatttgtgaaagcacatatttgggaactctggtagcttgagttgggaatgggaaggttcttttttacagaagtacttccccagggacttctgtgtgtcacagtcacctctgatgcctttatcttgatgttgcattgggaatctcagccatcagcccaagtgcttgttttattccaaggcagggtaatccccgtcaacttactctaacctttgctgaaaactaatcttgattcattctactctgaaaatccaaaggtgcttctgagagataagagggaaggggtagaaggaaaggtgccccttgaaatgggaattgagcctgttagaattaaaagcttatctcacctctgctggggacagtatttgcaccaccaacccctctcctcacctgctttgagcgataatctttatcagatattctaaacttaaagggattccctttaaaccaactcaagctgatctttcctatctagcctgctgtttggctgtactcatgggctttggtaatatctcctaaaaatgaggttttggtaatttttcctatgcattgggcaactgtgatcgtgaccactgtgctgtcttgctccagccactgccctggcctcagcatatcagggcagcctgtgctggctgcaatactgtggtgcttgggccactgcctgagaggagccaggtttgtgtgtgtctgcatgtgtgtgtgtgtgtgtttgtacagattcaagcaatggatgcaaggaacatgctgtatgtaatagaagaaagaagtccacgttttcggcagaagtagtgagtcagtgtggaagagaggtgagggtgtgctttactttttgataaagagaaagatgtttactcataaacccttcaaaaggtattaacaaaatgtttaccaaacctattgctttattttaaaaacataatttgtgttttctatttgtaagatctgacatttcgaggcaataaaaacttctcagaaagtaaaaaaaaaaaaaaa

SEQ ID NO: 761 - protein, 526 aa, Homo Sapiens
MVNEGPNQEESDDTPVPESALQADPSVSVHPSVSVHPSVSINPSVSVHPSSSAHPSALAQPSGLAHPSSSGPEDLSVIKVSRRRWAVVLVFSCYSMCNSFQWIQYGSINNIFMHFYGVSAFAIDWLSMCYMLTYIPLLLPVAWLLEKFGLRTIALTGSALNCLGAWVKLGSLKPHLFPVTVVGQLICSVAQVFILGMPSRIASVWFGANEVSTACSVAVFGNQLGIAIGFLVPPVLVPNIEDRDELAYHISIMFYIIGGVATLLLILVIIVFKEKPKYPPSRAQSLSYALTSPDASYLGSIARLFKNLNFVLLVITYGLNAGAFYALSTLLNRMVIWHYPGEEVNAGRIGLTIVIAGMLGAVISGIWLDRSKTYKETTLVVYIMTLVGMVVYTFTLNLGHLWVVFITAGTMGFFMTGYLPLGFEFAVELTYPESEGISSGLLNISAQVFGIIFTISQGQIIDNYGTKPGNIFLCVFLTLGAALTAFIKADLRRQKANKETLENKLQEEEEESNTSKVPTAVSEDHL

SEQ ID NO: 762 - DNA, 5843 bp, Homo Sapiens
gagcggacaggcgtggcggccggagccccagcatccctgcttgaggtccaggagcggagcccgcggccaccgccgcctgatcagcgcgaccccggcccgcgcccgccccgcccggcaagatgctgcccgtgtaccaggaggtgaagcccaacccgctgcaggacgcgaacctctgctcacgcgtgttcttctggtggctcaatcccttgtttaaaattggccataaacggagattagaggaagatgatatgtattcagtgctgccagaagaccgctcacagcaccttggagaggagttgcaagggttctgggataaagaagttttaagagctgagaatgacgcacagaagccttctttaacaagagcaatcataaagtgttactggaaatcttatttagttttgggaatttttacgttaattgaggaaagtgccaaagtaatccagcccatatttttgggaaaaattattaattattttgaaaattatgatcccatggattctgtggctttgaacacagcgtacgcctatgccacggtgctgactttttgcacgctcattttggctatactgcatcacttatatttttatcacgttcagtgtgctgggatgaggttacgagtagccatgtgccatatgatttatcggaaggcacttcgtcttagtaacatggccatggggaagacaaccacaggccagatagtcaatctgctgtccaatgatgtgaacaagtttgatcaggtgacagtgttcttacacttcctgtgggcaggaccactgcaggcgattgcagtgactgccctactctggatggagataggaatatcgtgccttgctgggatggcagttctaatcattctcctgcccttgcaaagctgttttgggaagttgttctcatcactgaggagtaaaactgcaactttcacggatgccaggatcaggaccatgaatgaagttataactggtataaggataataaaaatgtacgcctgggaaaagtcattttcaaatcttattaccaatttgagaaagaaggagatttccaagattctgagaagttcctgcctcagagggatgaatttggcttcatttttcagtgcaagcaaaatcatcgtgtttgtgaccttcaccacctacgtgctcctcggcagtgtgatcacagccagccgcgtgttcgtggcagtgacgctgtatggggctgtgcggctgacggttaccctcttcttcccctcagccattgagagggtgtcagaggcaatcgtcagcatccgaagaatccagacctttttgctacttgatgagatatcacagcgcaaccgtcagctgccgtcagatggtaaaaagatggtgcatgtgcaggattttactgctttttgggataaggcatcagagaccccaactctacaaggcctttcctttactgtcagacctggcgaattgttagctgtggtcggccccgtgggagcagggaagtcatcactgttaagtgccgtgctcggggaattggccccaagtcacgggctggtcagcgtgcatggaagaattgcctatgtgtctcagcagccctgggtgttctcgggaactctgaggagtaatattttatttgggaagaaatacgaaaaggaacgatatgaaaaagtcataaaggcttgtgctctgaaaaaggatttacagctgttggaggatggtgatctgactgtgataggagatcggggaaccacgctgagtggagggcagaaagcacgggtaaaccttgcaagagcagtgtatcaagatgctgacatctatctcctggacgatcctctcagtgcagtagatgcggaagttagcagacacttgttcgaactgtgtatttgtcaaattttgcatgagaagatcacaattttagtgactcatcagttgcagtacctcaaagctgcaagtcagattctgatattgaaagatggtaaaatggtgcagaaggggacttacactgagttcctaaaatctggtatagattttggctcccttttaaagaaggataatgaggaaagtgaacaacctccagttccaggaactcccacactaaggaatcgtaccttctcagagtcttcggtttggtctcaacaatcttctagaccctccttgaaagatggtgctctggagagccaagatacagagaatgtcccagttacactatcagaggagaaccgttctgaaggaaaagttggttttcaggcctataagaattacttcagagctggtgctcactggattgtcttcattttccttattctcctaaacactgcagctcaggttgcctatgtgcttcaagattggtggctttcatactgggcaaacaaacaaagtatgctaaatgtcactgtaaatggaggaggaaatgtaaccgagaagctagatcttaactggtacttaggaatttattcaggtttaactgtagctaccgttctttttggcatagcaagatctctattggtattctacgtccttgttaactcttcacaaactttgcacaacaaaatgtttgagtcaattctgaaagctccggtattattctttgatagaaatccaataggaagaattttaaatcgtttctccaaagacattggacacttggatgatttgctgccgctgacgtttttagatttcatccagacattgctacaagtggttggtgtggtctctgtggctgtggccgtgattccttggatcgcaatacccttggttccccttggaatcattttcatttttcttcggcgatattttttggaaacgtcaagagatgtgaagcgcctggaatctacaactcggagtccagtgttttcccacttatcatcttctctccaggggctctggaccatccgggcatacaaagcagaagagaggtgtcaggaactgtttgatgcacaccaggatttacattcagaggcttggttcttgtttttgacaacgtcccgctggtttgccgtccgtctggatgccatctgtgccatgtttgtcatcatcgttgcctttgggtccctgattctggcaaaaactctggatgccgggcaggttggtttggcactgtcctatgccctcacgctcatggggatgtttcagtggtgtgttcgacaaagtgctgaagttgagaatatgatgatctcagtagaaagggtcattgaatacacagaccttgaaaaagaagcaccttgggaatatcagaaacgcccaccaccagcctggccccatgaaggagtgataatctttgacaatgtgaacttcatgtacagtccaggtgggcctctggtactgaagcatctgacagcactcattaaatcacaagaaaaggttggcattgtgggaagaaccggagctggaaaaagttccctcatctcagccctttttagattgtcagaacccgaaggtaaaatttggattgataagatcttgacaactgaaattggacttcacgatttaaggaagaagatgtcaatcatacctcaggaacctgttttgttcactggaacaatgaggaaaaacctggatccctttaatgagcacacggatgaggaactgtggaatgccttacaagaggtacaacttaaagaaaccattgaagatcttcctggtaaaatggatactgaattagcagaatcaggatccaattttagtgttggacaaagacaactggtgtgccttgccagggcaattctcaggaaaaatcagatattgattattgatgaagcgacggcaaatgtggatccaagaactgatgagttaatacaaaaaaaaatccgggagaaatttgcccactgcaccgtgctaaccattgcacacagattgaacaccattattgacagcgacaagataatggttttagattcaggaagactgaaagaatatgatgagccgtatgttttgctgcaaaataaagagagcctattttacaagatggtgcaacaactgggcaaggcagaagccgctgccctcactgaaacagcaaaacaggtatacttcaaaagaaattatccacatattggtcacactgaccacatggttacaaacacttccaatggacagccctcgaccttaactattttcgagacagcactgtgaatccaaccaaaatgtcaagtccgttccgaaggcattttccactagtttttggactatgtaaaccacattgtacttttttttactttggcaacaaatatttatacatacaagatgctagttcatttgaatatttctcccaacttatccaaggatctccagctctaacaaaatggtttatttttatttaaatgtcaatagttgttttttaaaatccaaatcagaggtgcaggccaccagttaaatgccgtctatcaggttttgtgccttaagagactacagagtcaaagctcatttttaaaggagtaggacaaagttgtcacaggtttttgttgttgtttttattgcccccaaaattacatgttaatttccatttatatcagggattctatttacttgaagactgtgaagttgccattttgtctcattgttttctttgacataactaggatccattatttcccctgaaggcttcttgttagaaaatagtacagttacaaccaataggaacaacaaaaagaaaaagtttgtgacattgtagtagggagtgtgtaccccttactccccatcaaaaaaaaaaatggatacatggttaaaggatagaagggcaatattttatcatatgttctaaaagagaaggaagagaaaatactactttctcaaaatggaagcccttaaaggtgctttgatactgaaggacacaaatgtgaccgtccatcctcctttagagttgcatgacttggacacggtaactgttgcagttttagactcagcattgtgacacttcccaagaaggccaaacctctaaccgacattcctgaaatacgtggcattattcttttttggatttctcatttatggaaggctaaccctctgttgactgtaagccttttggtttgggctgtattgaaatcctttctaaattgcatgaataggctctgctaacgtgatgagacaaactgaaaattattgcaagcattgactataattatgcagtacgttctcaggatgcatccaggggttcattttcatgagcctgtccaggttagtttactcctgaccactaatagcattgtcatttgggctttctgttgaatgaatcaacaaaccacaatacttcctgggaccttttgtactttatttgaactatgagtctttaatttttcctgatgatggtggctgtaatatgttgagttcagtttactaaaggttttactattatggtttgaagtggagtctcatgacctctcagaataaggtgtcacctccctgaaattgcatatatgtatatagacatgcacacgtgtgcatttgtttgtatacatatatttgtccttcgtatagcaagttttttgctcatcagcagagagcaacagatgttttattgagtgaagccttaaaaagcacacaccacacacagctaactgccaaaatacattgaccgtagtagctgttcaactcctagtacttagaaatacacgtatggttaatgttcagtccaacaaaccacacacagtaaatgtttattaatagtcatggttcgtattttaggtgactgaaattgcatcagtgatcataatgaggtttgttaaaacgatagctatattcaaaatgtctatatgtttatttggacttttgaggttaaagacagtcatataaacgtcctgtttctgttttaatgttatcatagaattttttaatgaaactaaattcaattgaaataaatgatagttttcatctccattcaga

SEQ ID NO: 763 - protein, 1325 aa, Homo Sapiens
MLPVYQEVKPNPLQDANLCSRVFFWWLNPLFKIGHKRRLEEDDMYSVLPEDRSQHLGEELQGFWDKEVLRAENDAQKPSLTRAIIKCYWKSYLVLGIFTLIEESAKVIQPIFLGKIINYFENYDPMDSVALNTAYAYATVLTFCTLILAILHHLYFYHVQCAGMRLRVAMCHMIYRKALRLSNMAMGKTTTGQIVNLLSNDVNKFDQVTVFLHFLWAGPLQAIAVTALLWMEIGISCLAGMAVLIILLPLQSCFGKLFSSLRSKTATFTDARIRTMNEVITGIRIIKMYAWEKSFSNLITNLRKKEISKILRSSCLRGMNLASFFSASKIIVFVTFTTYVLLGSVITASRVFVAVTLYGAVRLTVTLFFPSAIERVSEAIVSIRRIQTFLLLDEISQRNRQLPSDGKKMVHVQDFTAFWDKASETPTLQGLSFTVRPGELLAVVGPVGAGKSSLLSAVLGELAPSHGLVSVHGRIAYVSQQPWVFSGTLRSNILFGKKYEKERYEKVIKACALKKDLQLLEDGDLTVIGDRGTTLSGGQKARVNLARAVYQDADIYLLDDPLSAVDAEVSRHLFELCICQILHEKITILVTHQLQYLKAASQILILKDGKMVQKGTYTEFLKSGIDFGSLLKKDNEESEQPPVPGTPTLRNRTFSESSVWSQQSSRPSLKDGALESQDTENVPVTLSEENRSEGKVGFQAYKNYFRAGAHWIVFIFLILLNTAAQVAYVLQDWWLSYWANKQSMLNVTVNGGGNVTEKLDLNWYLGIYSGLTVATVLFGIARSLLVFYVLVNSSQTLHNKMFESILKAPVLFFDRNPIGRILNRFSKDIGHLDDLLPLTFLDFIQTLLQVVGVVSVAVAVIPWIAIPLVPLGIIFIFLRRYFLETSRDVKRLESTTRSPVFSHLSSSLQGLWTIRAYKAEERCQELFDAHQDLHSEAWFLFLTTSRWFAVRLDAICAMFVIIVAFGSLILAKTLDAGQVGLALSYALTLMGMFQWCVRQSAEVENMMISVERVIEYTDLEKEAPWEYQKRPPPAWPHEGVIIFDNVNFMYSPGGPLVLKHLTALIKSQEKVGIVGRTGAGKSSLISALFRLSEPEGKIWIDKILTTEIGLHDLRKKMSIIPQEPVLFTGTMRKNLDPFNEHTDEELWNALQEVQLKETIEDLPGKMDTELAESGSNFSVGQRQLVCLARAILRKNQILIIDEATANVDPRTDELIQKKIREKFAHCTVLTIAHRLNTIIDSDKIMVLDSGRLKEYDEPYVLLQNKESLFYKMVQQLGKAEAAALTETAKQVYFKRNYPHIGHTDHMVTNTSNGQPSTLTIFETAL

SEQ ID NO: 764 - DNA, 4553 bp, Homo Sapiens
acgcgtctgcggccagcccggactctttaaaagccggcggtgcgcggggcatcccagccaagccggagaggaggcgagcagcagggcctggtggcgagagcgcggctgtcactgcgcccgagcatcccagagctttccgagcggacgagccggccgtgccgggcatccccagcctcgctaccctcgcagcacacgtcgagccccgcacaggcgagggtccggaacttagcccaaagcacgtttcccctggcagcgcaggaaacgcccggccgcgcgccggcgcacgcccccctctcctcctttgttccgggggtcggcggccgctctcctgccagcgtcgggatctcggccccgggaggcgggccgtcgggcgcagccgcgaagatgccgttggaactgacgcagagccgagtgcagaagatctgggtgcccgtggaccacaggccctcgttgcccagatcctgtgggccaaagctgaccaactcccccaccgtcatcgtcatggtgggcctccccgcccggggcaagacctacatctccaagaagctgactcgctacctcaactggattggcgtccccacaaaagtgttcaacgtcggggagtatcgccgggaggctgtgaagcagtacagctcctacaacttcttccgccccgacaatgaggaagccatgaaagtccggaagcaatgtgccttagctgccttgagagatgtcaaaagctacctggcgaaagaagggggacaaattgcggttttcgatgccaccaatactactagagagaggagacacatgatccttcattttgccaaagaaaatgactttaaggcgtttttcatcgagtcggtgtgcgacgaccctacagttgtggcctccaatatcatggaagttaaaatctccagcccggattacaaagactgcaactcggcagaagccatggacgacttcatgaagaggatcagttgctatgaagccagctaccagcccctcgaccccgacaaatgcgacagggacttgtcgctgatcaaggtgattgacgtgggccggaggttcctggtgaaccgggtgcaggaccacatccagagccgcatcgtgtactacctgatgaacatccacgtgcagccgcgtaccatctacctgtgccggcacggcgagaacgagcacaacctccagggccgcatcgggggcgactcaggcctgtccagccggggcaagaagtttgccagtgctctgagcaagttcgtggaggagcagaacctgaaggacctgcgcgtgtggaccagccagctgaagagcaccatccagacggccgaggcgctgcggctgccctacgagcagtggaaggcgctcaatgagatcgacgcgggcgtctgtgaggagctgacctacgaggagatcagggacacctaccctgaggagtatgcgctgcgggagcaggacaagtactattaccgctaccccaccggggagtcctaccaggacctggtccagcgcttggagccagtgatcatggagctggagcggcaggagaatgtgctggtcatctgccaccaggccgtcctgcgctgcctgcttgcctacttcctggataagagtgcagaggagatgccctacctgaaatgccctcttcacaccgtcctgaaactgacgcctgtcgcttatggctgccgtgtggaatccatctacctgaacgtggagtccgtctgcacacaccgggagaggtcagaggatgcaaagaagggacctaacccgctcatgagacgcaatagtgtcaccccgctagccagccccgaacccaccaaaaagcctcgcatcaacagctttgaggagcatgtggcctccacctcggccgccctgcccagctgcctgcccccggaggtgcccacgcagctgcctggacaaaacatgaaaggctcccggagcagcgctgactcctccaggaaacactgaggcagacgtgtcggttccattccatttccatttctgcagcttagcttgtgtcctgccctccgcccgaggcaaaacgtatcctgaggacttcttccggagagggtggggtggagcagcgggggagccttggccgaagagaaccatgcttggcaccgtctgtgtcccctcggccgctggacaccagaaagccacgtgggtccctggcgccctgcctttagccgtggggcccccacctccactctctgggtttcctaggaatgtccagcctcggagaccttcacaaagccttgggagggtgatgagtgctggtcctgacaggaggccgctggggacactgtgctgttttgtttcgtttctgtgatctcccggcacgtttggagctgggaagaccacactggtggcagaatcctaaaattaaaggaggcaggctcctagttgctgaaagttaaggaatgtgtaaaacctccacgtgactgtttggtgcatcttgacctgggaagacgcctcatgggaacgaacttggacaggtgttgggttgaggcctcttctgcaggaagtccctgagctgagacgcaagttggctgggtggtccgcaccctggctctcctgcaggtccacacaccttccaggcctgtggcctgcctccaaagatgtgcaagggcaggctggctgcacggggagagggaagtattttgccgaaatatgagaactggggcctcctgctcccagggagctccagggcccctctctcctcccacctggacttggggggaactgagaaacactttcctggagctgctggcttttgcacttttttgatggcagaagtgtgacctgagagtcccaccttctcttcaggaacgtagatgttggggtgtcttgccctggggggcttggaacctctgaaggtggggagcggaacacctggcatccttccccagcacttgcattaccgtccctgctcttcccaggtggggacagtggcccaagcaaggcctcactcgcagccacttcttcaagagctgcctgcacactgtcttggagcatctgccttgtgcctggcactctgccggtgccttgggaaggtcggaagagtggactttgtcctggccttcccttcatggcgtctatgacacttttgtggtgatggaaagcatgggacctgtcgtctcagcctgttggtttctcctcattgcctcaaaccctggggtaggtgggacggggggtctcgtgcccagatgaaaccatttggaaactcggcagcagagtttgtccaaatgacccttttcaggatgtctcaaagcttgtgccaaaggtcacttttctttcctgccttctgctgtgagccctgagatcctcctcccagctcaagggacaggtcctgggtgagggtgggagatttagacacctgaaactgggcgtggagagaagagccgttgctgtttgttttttgggaagagcttttaaagaatgcatgtttttttcctggttggaattgagtaggaactgaggctgtgcttcaggtatggtacaatcaagtgggggattttcatgctgaaccattcaagccctccccgcccgttgcacccactttggctggcgtctgctggagaggatgtctctgtccgcattcccgtgcagctccaggctcgcgcagttttctctctctccctggatgttgagtctcatcagaatatgtgggtagggggtggacgtgcacgggtgcatgattgtgcttaacttggttgtatttttcgatttgacatggaaggcctgttgctttgctcttgagaatagtttctcgtgtccccctcgcaggcctcattctttgaacatcgactctgaagtttgatacagataggggcttgatagctgtggtcccctctcccctctgactacctaaaatcaatacctaaatacagaagccttggtctaacacgggacttttagtttgcgaagggcctagatagggagagaggtaacatgaatctggacagggagggagatactatagaaaggagaacactgcctactttgcaagccagtgacctgccttttgaggggacattggacgggggccgggggcgggggttgggtttgagctacagtcatgaacttttggcgtctactgattcctccaactctccaccccacaaaataacggggaccaatatttttaactttgcctatttgtttttgggtgagtttcccccctccttattctgtcctgagaccacgggcaaagctcttcattttgagagagaagaaaaactgtttggaaccacaccaatgatatttttctttgtaatacttgaaatttatttttttattattttgatagcagatgtgctatttatttatttaatatgtataaggagcctaaacaatagaaagctgtagagattgggtttcattgttaattggtttgggagcctcctatgtgtgacttatgacttctctgtgttctgtgtatttgtctgaattaatgacctgggatataaagctatgctagctttcaaacaggagatgcctttcagaaatttgtatattttgcagttgccagaccaataaaatacctggttgaaatacatggacgaagtaaaaaa

SEQ ID NO: 765 - protein, 520 aa, Homo Sapiens
MPLELTQSRVQKIWVPVDHRPSLPRSCGPKLTNSPTVIVMVGLPARGKTYISKKLTRYLNWIGVPTKVFNVGEYRREAVKQYSSYNFFRPDNEEAMKVRKQCALAALRDVKSYLAKEGGQIAVFDATNTTRERRHMILHFAKENDFKAFFIESVCDDPTVVASNIMEVKISSPDYKDCNSAEAMDDFMKRISCYEASYQPLDPDKCDRDLSLIKVIDVGRRFLVNRVQDHIQSRIVYYLMNIHVQPRTIYLCRHGENEHNLQGRIGGDSGLSSRGKKFASALSKFVEEQNLKDLRVWTSQLKSTIQTAEALRLPYEQWKALNEIDAGVCEELTYEEIRDTYPEEYALREQDKYYYRYPTGESYQDLVQRLEPVIMELERQENVLVICHQAVLRCLLAYFLDKSAEEMPYLKCPLHTVLKLTPVAYGCRVESIYLNVESVCTHRERSEDAKKGPNPLMRRNSVTPLASPEPTKKPRINSFEEHVASTSAALPSCLPPEVPTQLPGQNMKGSRSSADSSRKH

SEQ ID NO: 766 - DNA, 2493 bp, Homo Sapiens
ccctccgggcaggggaggtaggcctgggcctgacgccggccacgcagcggcgggagagtgagcactcgggcggcggcgtcctggagacccgcgagagatggaagcggcggcgacgccggcggctgccggggcggcgaggcgcgaggagctagatatggatgtaatgaggcccttgataaatgagcagaattttgatgggacatcagatgaagaacatgagcaagagcttctgcctgttcagaagcattaccaacttgatgatcaagagggcatttcatttgtacaaactcttatgcaccttcttaaaggaaatattggaactggccttttaggacttccattggcaataaaaaatgcaggcatagtgcttggaccaatcagccttgtgtttataggaattatttctgttcactgtatgcacatattggtacgttgcagtcactttctatgtctgaggtttaaaaagtcaacattaggttatagtgacactgtgagctttgctatggaagtgagtccttggagttgtcttcagaagcaagcagcatgggggcggagtgtggttgacttttttctggtgataacacagctgggattctgtagtgtttatattgtcttcttagctgaaaatgtgaaacaagttcatgaaggattcctggagagtaaagtgtttatttcaaatagtaccaattcatcaaacccttgtgagagaagaagtgttgacctaaggatatatatgctttgctttcttccatttataattcttttggtcttcattcgtgaactaaagaatctatttgtactttcattccttgccaacgtttccatggctgtcagtcttgtgataatttaccagtatgttgtcaggaacatgccagatccccacaaccttccaatagtggctggttggaagaaatacccactcttttttggtactgctgtatttgcttttgaaggcataggagtggtccttccactggaaaaccaaatgaaagaatcaaagcgtttccctcaagcgttgaatattggcatggggattgttacaactttgtatgtaacattagctactttaggatatatgtgtttccatgatgaaatcaaaggcagcataactttaaatcttccccaagatgtatggttatatcaatcagtgaaaattctatattcctttggcatttttgtgacatattcaattcagttctatgttccagcagagatcattatccctgggatcacatccaaatttcatactaaatggaagcaaatctgtgaatttgggataagatccttcttggttagtattacttgtgccggagcaattcttattcctcgtttagacattgtgatttccttcgttggagctgtgagcagcagcacattggccctaatcctgccacctttggttgaaattcttacattttcgaaggaacattataatatatggatggtcctgaaaaatatttctatagcattcactggagttgttggcttcttattaggtacatatataactgttgaagaaattatttatcctactcccaaagttgtagctggcactccacagagtccttttctaaatttgaattcaacatgcttaacatctggtttgaaatagtaaaagcagaatcatgagtcttctatttttgtcccatttctgaaaattatcaagataactagtaaaatacattgctatatacataaaaatggtaacaaactctgttttctttggcacgatattaatattttggaagtaatcataactctttaccagtagtggtaaacctatggaaaatccttgcttttaagtgttagcaatagttcaaaaaattaagttctgaaaattgaaaaaattaaaatgtaaaaaaattaaagaataaaaatacttctattattcttttatctcagtaagaaataccttaaccaagttatctctcttttatgctactcttttgccactcacttgagaacagaataggatttcaacaataagagaataaaataagaacatgtataacaaaaagctctctccagatcatccctgtgaatgccaaagtaaactttatgtacagtgtaaaaaaaaaaaatctcagttatgtttttattagccaaattctaatgattggctcctggaagtatagaaaactcccattaacataatataagcatcagaaaattgcaaacactagaattaattttacactctaatggtagttgatcttcatagtcaagaggcactgttcaagatcatgacttagtgtttcaatgaaatttgaaaagggactttaaaacttatccagtgcaactcccttgtttttcgtcagaggaaaaggaggcctagaaaggttaagtaacttggtcgagaccactcagccttgagatcaagaaaacctaatcttttgactcccaggccaggatgttttatttctcacatcatgtccaagaaaaagaataaattatgttcagcttaaaaaaaaaaaaaaaaaaaaaaaaaaaaaa

SEQ ID NO: 767 - protein, 504 aa, Homo Sapiens
MEAAATPAAAGAARREELDMDVMRPLINEQNFDGTSDEEHEQELLPVQKHYQLDDQEGISFVQTLMHLLKGNIGTGLLGLPLAIKNAGIVLGPISLVFIGIISVHCMHILVRCSHFLCLRFKKSTLGYSDTVSFAMEVSPWSCLQKQAAWGRSVVDFFLVITQLGFCSVYIVFLAENVKQVHEGFLESKVFISNSTNSSNPCERRSVDLRIYMLCFLPFIILLVFIRELKNLFVLSFLANVSMAVSLVIIYQYVVRNMPDPHNLPIVAGWKKYPLFFGTAVFAFEGIGVVLPLENQMKESKRFPQALNIGMGIVTTLYVTLATLGYMCFHDEIKGSITLNLPQDVWLYQSVKILYSFGIFVTYSIQFYVPAEIIIPGITSKFHTKWKQICEFGIRSFLVSITCAGAILIPRLDIVISFVGAVSSSTLALILPPLVEILTFSKEHYNIWMVLKNISIAFTGVVGFLLGTYITVEEIIYPTPKVVAGTPQSPFLNLNSTCLTSGLK

SEQ ID NO: 768 - DNA, 2158 bp, Homo Sapiens
atattctacatctatcggagctgaacttcctaaaagacaaagtgtttatctttcaagattcattctccctgaatcttaccaacaaaacactcctgaggagaaagaaagagagggagggagagaaaaagagagagagagaaacaaaaaaccaaagagagagaaaaaatgaattcatctaaatcatctgaaacacaatgcacagagagaggatgcttctcttcccaaatgttcttatggactgttgctgggatccccatcctatttctcagtgcctgtttcatcaccagatgtgttgtgacatttcgcatctttcaaacctgtgatgagaaaaagtttcagctacctgagaatttcacagagctctcctgctacaattatggatcaggttcagtcaagaattgttgtccattgaactgggaatattttcaatccagctgctacttcttttctactgacaccatttcctgggcgttaagtttaaagaactgctcagccatgggggctcacctggtggttatcaactcacaggaggagcaggaattcctttcctacaagaaacctaaaatgagagagttttttattggactgtcagaccaggttgtcgagggtcagtggcaatgggtggacggcacacctttgacaaagtctctgagcttctgggatgtaggggagcccaacaacatagctaccctggaggactgtgccaccatgagagactcttcaaacccaaggcaaaattggaatgatgtaacctgtttcctcaattattttcggatttgtgaaatggtaggaataaatcctttgaacaaaggaaaatctctttaagaacagaaggcacaactcaaatgtgtaaagaaggaagagcaagaacatggccacacccaccgccccacacgagaaatttgtgcgctgaacttcaaaggacttcataagtatttgttactctgatataaataaaaataagtagttttaaatgttataattcatgttactggctgaagtgcattttctctctacgttagtctcaggtcctcttcccagaatttacaaagcaattcactaccttttgctacatttgcctcattttttagtgttcgtatgaaagtacagggacacggagccaagacagagtctagcaaagaaggggattttggaaggtgccttccaaaaatctcctgaatccgggctctgtagcaggtcctcttctttctagcttctgacaagtctgtcttctcttcttggtttcataccgttcttatctcctgcccaagcatatatcgtctctttactcccctgtataatgagtaagaagcttcttcaagtcatgaaacttattcctgctcagaataccggtgtggcctttctggctacaggcctccactgcaccttcttagggaagggcatgccagccatcagctccaaacaggctgtaaccaagtccacccatccctggggcttcctttgctctgccttattttcaattgactgaatggatctcaccagattttgtatctattgctcagctaggacccgagtccaatagtcaatttattctaagcgaacattcatctccacactttcctgtctcaagcccatccattatttcttaacttttattttagctttcgggggtacatgttaaaggctttttatataggtaaactcatgtcgtggaggtttgttgtacagattatttcatcacccaggtattaagcccagtgcctaatattgtttttttcggctcctctccctcctcctaccttccgccctcaagtagactccagtgtctgttattcccttctttgtgtttatgaattctcatcatttagctcccacttataagtgaggacatgcagtatttggttttctgttcccatgtttgctaaggataatggtttccagttctaccgatgttcccacaaaagacataattttcttttttaaggctgcttagtattccatggtatctatgtatcacattttctctatccaatctattgttgactcacatttagattgattccatgtttttgctattgtgaatagtgctgcaatgaacattcgtgtgcatgtgtctttatggtagaaagatttatatttctctgagtatgtatccagtaatagcccattcatttattgcataaaattctaccaatac

SEQ ID NO: 769 - protein, 219 aa, Homo Sapiens
MNSSKSSETQCTERGCFSSQMFLWTVAGIPILFLSACFITRCVVTFRIFQTCDEKKFQLPENFTELSCYNYGSGSVKNCCPLNWEYFQSSCYFFSTDTISWALSLKNCSAMGAHLVVINSQEEQEFLSYKKPKMREFFIGLSDQVVEGQWQWVDGTPLTKSLSFWDVGEPNNIATLEDCATMRDSSNPRQNWNDVTCFLNYFRICEMVGINPLNKGKSL

SEQ ID NO: 770 - DNA, 3995 bp, Homo Sapiens
ccccgccccgctcctctccggccgcgcagccgctgccgcccacccgcacccgccgtcatgctccgggccgcgctgcccgcgctcctgctgccgttgctgggcctcgccgctgctgccgtcgcggactgtccttcatctacttggattcagttccaagacagttgttacatttttctccaagaagccatcaaagtagaaagcatagaggatgtcagaaatcagtgtactgaccatggagcggacatgataagcatacataatgaagaagaaaatgcttttatactggatactttgaaaaagcaatggaaaggcccagatgatatcctactaggcatgttttatgacacagatgatgcgagtttcaagtggtttgataattcaaatatgacatttgataagtggacagaccaagatgatgatgaggatttagttgacacctgtgcttttctgcacatcaagacaggtgaatggaaaaaaggaaattgtgaagtttcttctgtggaaggaacactatgcaaaacagctatcccatacaaaaggaaatatttatcagataaccacattttaatatcagcattggtgattgctagcacggtaattttgacagttttgggagcaatcatttggttcctgtacaaaaaacattctgattctcgtttcaccacagttttttcaaccgcaccccaatcaccttataatgaagactgtgttttggtagttggagaagaaaatgaatatcctgttcaatttgactaagtttttggtaatcttgcactaagacatcaacaaaatgccctggcagagataacttgggaaagattttaatataaaacttgacattggatattagagctttaatggtattccttattccagtaacatttttatgtactcatctgctgtgaaaagtctttaggttcattaaaaaaacaggttttagaaatgatcttagatctaatatagtgattttaagcatcccgtcaaaggcagaatctgtcacttgaatgaaggaaagcttaaagcccaagcagataaaaataaaagcccagcctatttgtcttgcctgctgtatcttccctatttagttgacccactttagtttatatgtttattagtaaacatgaaatggggaataagtgattttaagtacatcccatacatttaaatatctttgataattgttatttttttggcagataattcctctagaatgtgtatctttttatgatttagatgaagaaaattttacaacttttaacaccccacaccaattttagtttcattacttttacacacaccattttatcacaaatgactcaagttttaatgaatgtttataaattatttgaaacaaaatatgatcgctgtgtccaggatggcatagagaaagctggcaattaggttaacacttacatattatagtgcccctttaaggatttctctcttgccaccataccttttgtactttcccctatacaagatgtatctcattctcctcaagcatttataaatttttccttcaatgacatgaaaactgtgcaagcaaaaaccgaagaaaaacacttaagtacaactgtagtgacagtgatcaaagttttcagtgcatttattgtacattttaagaaaaaggtgaaaatcatttggggagtaaaaaaatgaaaaagctgaaacgagtaattttcctcaccatcaataaaccaaaaacaggaaagataaagaatgtataaatttcacgtaaattagtcacgtatcacttatcaatggggatacgttctaagaaatgcatagttagggaatcttgtgtgaaaatcagcttgtatttacacaaacccagatggtagagcctattttgtcccaaacctacacagcatgttactgtgctgaatactgcagacaattgtaacacaatatttgtgtatctaaatatagaaaaggtacagtaaaaatatggtctactaaggaaacactgttctatatgtggtccattactgactgaagtatactgtctagaagtctgaggctcaaagaaaagtaatccctcttctgaatccacaccccatcaattatcttactttcttctggggagatagatagatatactatctcactagcttgactaatggcaacaaagttccagcttgtgtagtctctttttattgaccacatgaatcgaaaacactcatcacaattaatggcactatcattaatgagacatgagtaactaaaaagtgatagaaaactattaacagtgcggctacatggtactgaaaatgcaggcattacaccagctgttacacaagcacaagcatgctctgtaagagctttacatttctgagattttgtatagtgattgagatgtctattttattattgatagactattactaatgtcaatattgaacactaccctggaattcctgcctggttttcctacccaaattgtaccactccttgaagaactacaggcacagtaaaaaaaatatggcgtattatgtgaactaaaagagttctaaaggagttcttaaaggagtggtagaatttgggtaggaaagtgattaagtccaacttaaaaccaacagtctcaaacgtctacaactacaatgtccaatgagccactagccacatgaggctatttaagtaaatttagtttaaaatccagttttcgaattacattagccacattgtcaagtgttcaaatcacaggtggttagtggctactgtactgggcaacatacattatagaacattttcattataggaagttttattgggcagtgctgctcttaaatcctaccttccactcaactcccatacaactttcttttgtacattttgatactttctacctaatggcagctcttccaaaatagctgctttaaactctgatttaattttcaatatttggtttcatttttcaacaggccaagaggcctctggtaatgaagtgctatatatatatatatgatggagtctcactgtgctgcccaggctacagtgcagtggctcgatcttggctctctccaatctccgccttgcaggttttcaagcaattctcctgcctcagcctccttagtagctgggaccacagacatctgtcaccacacccagctaactttttgtatttttggtagagacggggtttcgccatattgactgggctggtctcaaactcctgacctcaagtgatccacccaccttggtctcccaaagtgctgggattacatgcgtgagccaccacacttggcctacattttttctttatataccagaacatctataacaggcaccttatctactcattagtgaagagataattggattacacaggcaggcttgtttactacatccagaatgtagaaactgctttcttcaacatcttggttctagctagtaataacaatataattctttggcagatattcagaataacattttaaactacattttcttagaaaattgcattcttgtagtgagcagtgtatggtctcttttgttcagaatttaaaactgataaccaatgaaagccttttctcttattcctctaccgtcatttacatgataatctgaagctaatatgacaatatttaaatactaagtggtactagggaactacaagaatactgtaaagcttaagccattgttatcactgtcatttagcatttaataacaaaactatacagaattatgtgcataccaatgaatgttttgtaccatctagttaaattttttaaataaagttttatgggttaagcagaagacaactgtcatactgaattttattaaaagtatatatacttcaaattcaaagcatcccttaggacccacagaatatattaaaactaccacccttaaattttatatttttgctttaagacagacaatgcaaaggtaactggcaagaggtgagcaaatgttttagaacatttatattattgcttaaaatgagatttgaaattgtaataaaattcttggttatgaaaaaaaaaaaaaaaaaa

SEQ ID NO: 771 - protein, 232 aa, Homo Sapiens
MLRAALPALLLPLLGLAAAAVADCPSSTWIQFQDSCYIFLQEAIKVESIEDVRNQCTDHGADMISIHNEEENAFILDTLKKQWKGPDDILLGMFYDTDDASFKWFDNSNMTFDKWTDQDDDEDLVDTCAFLHIKTGEWKKGNCEVSSVEGTLCKTAIPYKRKYLSDNHILISALVIASTVILTVLGAIIWFLYKKHSDSRFTTVFSTAPQSPYNEDCVLVVGEENEYPVQFD

SEQ ID NO: 772 - DNA, 2005 bp, Homo Sapiens
caacggctcattctgctcccccgggtcggagccccccggagctgcgcgcgggcttgcagcgcctcgcccgcgctgtcctcccggtgtcccgcttctccgcgccccagccgccggctgccagcttttcggggccccgagtcgcacccagcgaagagagcgggcccgggacaagctcgaactccggccgcctcgcccttccccggctccgctccctctgccccctcggggtcgcgcgcccacgatgctgcagggccctggctcgctgctgctgctcttcctcgcctcgcactgctgcctgggctcggcgcgcgggctcttcctctttggccagcccgacttctcctacaagcgcagcaattgcaagcccatccctgccaacctgcagctgtgccacggcatcgaataccagaacatgcggctgcccaacctgctgggccacgagaccatgaaggaggtgctggagcaggccggcgcttggatcccgctggtcatgaagcagtgccacccggacaccaagaagttcctgtgctcgctcttcgcccccgtctgcctcgatgacctagacgagaccatccagccatgccactcgctctgcgtgcaggtgaaggaccgctgcgccccggtcatgtccgccttcggcttcccctggcccgacatgcttgagtgcgaccgtttcccccaggacaacgacctttgcatccccctcgctagcagcgaccacctcctgccagccaccgaggaagctccaaaggtatgtgaagcctgcaaaaataaaaatgatgatgacaacgacataatggaaacgctttgtaaaaatgattttgcactgaaaataaaagtgaaggagataacctacatcaaccgagataccaaaatcatcctggagaccaagagcaagaccatttacaagctgaacggtgtgtccgaaagggacctgaagaaatcggtgctgtggctcaaagacagcttgcagtgcacctgtgaggagatgaacgacatcaacgcgccctatctggtcatgggacagaaacagggtggggagctggtgatcacctcggtgaagcggtggcagaaggggcagagagagttcaagcgcatctcccgcagcatccgcaagctgcagtgctagtcccggcatcctgatggctccgacaggcctgctccagagcacggctgaccatttctgctccgggatctcagctcccgttccccaagcacactcctagctgctccagtctcagcctgggcagcttccccctgccttttgcacgtttgcatccccagcatttcctgagttataaggccacaggagtggatagctgttttcacctaaaggaaaagcccacccgaatcttgtagaaatattcaaactaataaaatcatgaatatttttatgaagtttaaaaatagctcactttaaagctagttttgaataggtgcaactgtgacttgggtctggttggttgttgtttgttgttttgagtcagctgattttcacttcccactgaggttgtcataacatgcaaattgcttcaattttctctgtggcccaaacttgtgggtcacaaaccctgttgagataaagctggctgttatctcaacatcttcatcagctccagactgagactcagtgtctaagtcttacaacaattcatcattttataccttcaatgggaacttaaactgttacatgtatcacattccagctacaatacttccatttattagaagcacattaaccatttctatagcatgatttcttcaagtaaaaggcaaaagatataaattttataattgacttgagtactttaagccttgtttaaaacatttcttacttaacttttgcaaattaaacccattgtagcttacctgtaatatacatagtagtttacctttaaaagttgtaaaaatattgctttaaccaacactgtaaatatttcagataaacattatattcttgtatataaactttacatcctgttttacctataaaaaaaaaaaaaaa

SEQ ID NO: 773 - protein, 295 aa, Homo Sapiens
MLQGPGSLLLLFLASHCCLGSARGLFLFGQPDFSYKRSNCKPIPANLQLCHGIEYQNMRLPNLLGHETMKEVLEQAGAWIPLVMKQCHPDTKKFLCSLFAPVCLDDLDETIQPCHSLCVQVKDRCAPVMSAFGFPWPDMLECDRFPQDNDLCIPLASSDHLLPATEEAPKVCEACKNKNDDDNDIMETLCKNDFALKIKVKEITYINRDTKIILETKSKTIYKLNGVSERDLKKSVLWLKDSLQCTCEEMNDINAPYLVMGQKQGGELVITSVKRWQKGQREFKRISRSIRKLQC

SEQ ID NO: 774 - DNA, 1409 bp, Homo Sapiens; identical to SEQ ID NO: 730

SEQ ID NO: 775 - protein, 390 aa, Homo Sapiens; identical to SEQ ID NO: 731

SEQ ID NO: 776 - DNA, 1084 bp, Homo Sapiens
aatgagcatccaaaagacgtatctggagggagattttgtctttcctgtgagcagcagcagcttcctacggaccctgctggagccccagctcggatcagcccttctgacagcaatgaatgcttcgtgctgcctgccctctgttcagccaacactgcctaatggctcggagcacctccaagcccctttcttcagcaaccagagcagcagcgccttctgtgagcaggtcttcatcaagcccgaggttttcctgtctctgggcatcgtcagtctgctggaaaacatcctggttatcctggccgtggtcaggaacggcaacctgcactccccgatgtacttctttctctgcagcctggcggtggccgacatgctggtaagtgtgtccaatgccctggagaccatcatgatcgccatcgtccacagcgactacctgaccttcgaggaccagtttatccagcacatggacaacatcttcgactccatgatctgcatctccctggtggcctccatctgcaacctcctggccatcgccgtcgacaggtacgtcaccatcttttacgcgctccgctaccacagcatcatgaccgtgaggaaggccctcaccttgatcgtggccatctgggtctgctgcggcgtctgtggcgtggtgttcatcgtctactcggagagcaaaatggtcattgtgtgcctcatcaccatgttcttcgccatgatgctcctcatgggcaccctctacgtgcacatgttcctctttgcgcggctgcacgtcaagcgcatagcagcactgccacctgccgacggggtggccccacagcaacactcatgcatgaagggggcagtcaccatcaccattctcctgggcgtgttcatcttctgctgggcccccttcttcctccacctggtcctcatcatcacctgccccaccaacccctactgcatctgctacactgcccacttcaacacctacctggtcctcatcatgtgcaactccgtcatcgacccactcatctacgctttccggagcctggaattgcgcaacacctttagggagattctctgtggctgcaacggcatgaacttgggatag

SEQ ID NO: 777 - protein, 323 aa, Homo Sapiens
MNASCCLPSVQPTLPNGSEHLQAPFFSNQSSSAFCEQVFIKPEVFLSLGIVSLLENILVILAVVRNGNLHSPMYFFLCSLAVADMLVSVSNALETIMIAIVHSDYLTFEDQFIQHMDNIFDSMICISLVASICNLLAIAVDRYVTIFYALRYHSIMTVRKALTLIVAIWVCCGVCGVVFIVYSESKMVIVCLITMFFAMMLLMGTLYVHMFLFARLHVKRIAALPPADGVAPQQHSCMKGAVTITILLGVFIFCWAPFFLHLVLIITCPTNPYCICYTAHFNTYLVLIMCNSVIDPLIYAFRSLELRNTFREILCGCNGMNLG

SEQ ID NO: 778 - DNA, 2438 bp, Homo Sapiens
ataagccagagcctagaccagtgagccaactgtgcgaaccagacccggcagccttgctcagttcagcatagcggagcggatccgatcggatcggagcggatcggagcacaccggagcaggctcatcgagaaggcgtctgcgagaccatggagaacggatacacctatgaagattataagaacactgcagaatggcttctgtctcacactaagcaccgacctcaagttgcaataatctgtggttctggattaggaggtctgactgataaattaactcaggcccagatctttgactacggtgaaatccccaactttccccgaagtacagtgccaggtcatgctggccgactggtgtttgggttcctgaatggcagggcctgtgtgatgatgcagggcaggttccacatgtatgaagggtacccactctggaaggtgacattcccagtgagggttttccaccttctgggtgtggacaccctggtagtcaccaatgcagcaggagggctgaaccccaagtttgaggttggagatatcatgctgatccgtgaccatatcaacctacctggtttcagtggtcagaaccctctcagagggcccaatgatgaaaggtttggagatcgtttccctgccatgtctgatgcctacgaccggactatgaggcagagggctctcagtacctggaaacaaatgggggagcaacgtgagctacaggaaggcacctatgtgatggtggcaggccccagctttgagactgtggcagaatgtcgtgtgctgcagaagctgggagcagacgctgttggcatgagtacagtaccagaagttatcgttgcacggcactgtggacttcgagtctttggcttctcactcatcactaacaaggtcatcatggattatgaaagcctggagaaggccaaccatgaagaagtcttagcagctggcaaacaagctgcacagaaattggaacagtttgtctccattcttatggccagcattccactccctgacaaagccagttgacctgccttggagtcgtctggcatctcccacacaagacccaagtagctgctaccttctttggccccttgctggagtcatgtgcctctgtccttaggttgtagcagaaaggaaaagattcctgtccttcacctttcccactttcttctaccagacccttctggtgccagatcctcttctcaaagctgggattacaggtgtgagcatagtgagaccttggcgctacaaaataaagctgttctcattcctgttctttcttacacaagagctggagcccgtgccctaccacacatctgtggagatgcccaggatttgactcgggccttagaactttgcatagcagctgctactagctctttgagataatacattccgaggggctcagttctgccttatctaaatcaccagagaccaaacaaggactaatccaatacctcttggattttatttaatgtcataatgttgtcagaataaagagaaagatgaaataatttcatttttttgtgtaacttggtatggggctggggcacagaccaagattgacatgaaaggatgtgagatcgcatgtcttgtgtgactatctgcttctcagacaagcagttaggaactgagatgagatagtatgtgagggcagcaaaggatgaagaagggcaaaatgatgaaaggtgaggtggaaagaggttatgagatggtaaagaaaagttaacttctggcacttgattgccacttctgtcaggctggtcctgcctctctcccttgccttctgattgtttcatttcctgtttatttgatcatatctgaattagttcactggttagcctcttccttagttcccacttccttaccaaagccctaattatatttcctcttgtttgccttttctctcctactcttctctaacatctgcagccacactctccattcactccatgctgacaaggcagtggcaaacacttttctctgctgccagccactccactgttgactggattgctgccagccccaggcaaacctgtgaagttgtttcatactctgcttctctttgagtgcctccttctctccttcctcttcctttctgggctccagtctttctcttcacttgtgcttgtcagaacctccctgtgatactgcctccaggcatttcccccatgttggctcaccgcactattatctttgcttatcaacttgcattcagctggctggcatgtttcaaaaccacactgccctcccaggcctgtgtgccttttgagaaagaccagtgctggatgagcctctagtaatgacaacattttagttgttagtggtataatacggaagagatattttgcacaggctgctttggagaactttcaaattatcctttgtttggtaactgacctacttaactgcccaatacaaagaaaaagcaaaaaaaaaaaaaaaaaa

SEQ ID NO: 779 - protein, 289 aa, Homo Sapiens
MENGYTYEDYKNTAEWLLSHTKHRPQVAIICGSGLGGLTDKLTQAQIFDYGEIPNFPRSTVPGHAGRLVFGFLNGRACVMMQGRFHMYEGYPLWKVTFPVRVFHLLGVDTLVVTNAAGGLNPKFEVGDIMLIRDHINLPGFSGQNPLRGPNDERFGDRFPAMSDAYDRTMRQRALSTWKQMGEQRELQEGTYVMVAGPSFETVAECRVLQKLGADAVGMSTVPEVIVARHCGLRVFGFSLITNKVIMDYESLEKANHEEVLAAGKQAAQKLEQFVSILMASIPLPDKAS

SEQ ID NO: 780 - DNA, 2200 bp, Homo Sapiens
ccgggaccatggagcctggtgacgcggcgcgccctggctcgggtcgggctaccggggcgccgccgccgcggctgctgctgctgccgctgctgctgggttgggggctgcgagtcgcggccgcggcctcggcctcctcctctggggcggcggcggaggacagcagcgccatggaggagctcgctactgagaaggaggcggaggagagccaccggcaagacagcgtgagcctgctcaccttcatcctgctgctcacgctcaccatcctcaccatctggctcttcaagcaccgccgggtgcgctttctgcacgagaccgggctggccatgatctatgggctcatcgttggggtgatcctgaggtatggtacccctgctaccagtggccgtgacaaatcactcagctgcactcaggaagacagggccttcagtaccttattagtgaatgtcagcggaaagttcttcgaatacactctgaaaggagaaatcagtcctggcaagatcaacagcgtagagcagaatgatatgctacggaaggtaacattcgatccagaagtatttttcaacattcttctgcctccaattatttttcatgctggatacagcttaaagaagagacactttttcagaaatcttggatctatactggcctatgccttcttggggactgctgtttcatgcttcattattggaaatctcatgtatggtgtggtgaagctcatgaagattatgggacagctctcagataaattttactacacagattgtctcttttttggagcaatcatctctgccactgacccagtgactgtgctggcgatatttaatgaattgcatgcagacgtggatctttacgcacttctttttggagagagcgtcctaaatgatgctgttgccattgtactgtcctcgtctattgttgcctaccagccagcgggactgaacactcacgcctttgatgctgctgccttttttaagtcagttggcatttttctaggtatatttagtggctcttttaccatgggagctgtgactggtgttaatgccaacgtgactaagtttaccaaactgcactgcttccccctgctggagacggcgctgttcttcctcatgtcctggagcacgtttctcttggcagaagcctgcggatttacaggtgttgtagctgtccttttctgtggaatcacacaagctcattacacctacaacaatctgtcggtggaatcaagaagtcgaaccaagcagctctttgaggtgttacatttcctggcagagaacttcatcttctcctacatgggcctggcactgtttaccttccagaagcacgttttcagccccattttcatcatcggagcttttgttgccatcttcctgggcagagccgcgcacatctacccgctctccttcttcctcaacttgggcagaaggcataagattggctggaattttcaacacatgatgatgttttcaggcctcaggggagcaatggcatttgcgttggccatccgtgacacggcatcctatgctcgccagatgatgttcacgaccacccttctcattgtgttcttcactgtctggatcattggaggaggcacgacacccatgttgtcatggcttaacatcagagttggcgtcgaggagccctccgaagaggaccagaatgaacaccactggcagtacttcagagttggtgttgaccccgatcaagacccaccacccaacaacgacagctttcaagtcttacaaggggacggcccagattctgccagaggaaaccggacaaaacaggagagcgcatggatattcaggctgtggtacagctttgatcacaattacctgaagcccatcctcacacacagtggtcccccactaaccaccacgctccccgcctggtgtggcttactagctcgatgtctgaccagtccccaggtgtacgataaccaagagccactgagagaggaagactctgatttcatcctgaccgaaggcgacctgacattgacctacggggacagcacagtgactgcaaatggctcctcaagttcgcacaccgcctccacgagtctggagggcagccggagaacgaagagcagctcggaggaagtgctggagcgagacctgggaatgggagaccagaaggtttcgagccggggcacccgcctagtgtttcccctggaagataatgcttgactttccccccaagc

SEQ ID NO: 781 - protein, 725 aa, Homo Sapiens
MEPGDAARPGSGRATGAPPPRLLLLPLLLGWGLRVAAAASASSSGAAAEDSSAMEELATEKEAEESHRQDSVSLLTFILLLTLTILTIWLFKHRRVRFLHETGLAMIYGLIVGVILRYGTPATSGRDKSLSCTQEDRAFSTLLVNVSGKFFEYTLKGEISPGKINSVEQNDMLRKVTFDPEVFFNILLPPIIFHAGYSLKKRHFFRNLGSILAYAFLGTAVSCFIIGNLMYGVVKLMKIMGQLSDKFYYTDCLFFGAIISATDPVTVLAIFNELHADVDLYALLFGESVLNDAVAIVLSSSIVAYQPAGLNTHAFDAAAFFKSVGIFLGIFSGSFTMGAVTGVNANVTKFTKLHCFPLLETALFFLMSWSTFLLAEACGFTGVVAVLFCGITQAHYTYNNLSVESRSRTKQLFEVLHFLAENFIFSYMGLALFTFQKHVFSPIFIIGAFVAIFLGRAAHIYPLSFFLNLGRRHKIGWNFQHMMMFSGLRGAMAFALAIRDTASYARQMMFTTTLLIVFFTVWIIGGGTTPMLSWLNIRVGVEEPSEEDQNEHHWQYFRVGVDPDQDPPPNNDSFQVLQGDGPDSARGNRTKQESAWIFRLWYSFDHNYLKPILTHSGPPLTTTLPAWCGLLARCLTSPQVYDNQEPLREEDSDFILTEGDLTLTYGDSTVTANGSSSSHTASTSLEGSRRTKSSSEEVLERDLGMGDQKVSSRGTRLVFPLEDNA

SEQ ID NO: 782 - DNA, 5903 bp, Homo Sapiens
gggaggcgggaggagagggggctgccaggggcgtccggttacatccccgccttcctctgtcctggccgcgggaccgggtttgcgggaccgcagttcgggaacatgttggcctcgagcagccggatccgggctgcgtggacgcgggcgctgctgctgccgctgctgctggcggggcctgtgggctgcctgagccgccaggagctctttcccttcggccccggacagggggacctggagctggaggacggggatgacttcgtctctcctgccctggagctgagtggggcgctccgcttctacgacagatccgacatcgacgcagtctacgtcaccacaaatggcatcattgctacgagtgaacccccggccaaagaatcccatcccgggctcttcccaccaacattcggtgcagtcgcccctttcctggcggacttggacacgaccgatggcctggggaaggtttattatcgagaagacttatccccctccatcactcagcgagcagcagagtgtgtccacagagggttcccggagatctctttccagcctagtagcgcggtggttgtcacttgggaatccgtggccccctaccaagggcccagcagggacccagaccagaaaggcaagagaaacacgttccaggctgttctagcctcctctgattccagctcctatgccattttcctttatcctgaggatggtctgcagttccatacgacattctcaaagaaggaaaacaaccaagttcctgccgtggttgcattcagtcaaggttcagtgggattcttatggaagagcaacggagcttataacatatttgctaatgacagggaatcagttgaaaatttggccaagagtagtaactctgggcagcagggtgtctgggtgtttgagattgggagtccagccaccaccaatggcgtggtgcctgcagacgtgatcctcggaactgaagatggggcagagtatgatgatgaggatgaagattatgacctggcgaccactcgtctgggcctggaggatgtgggcaccacgcccttctcctacaaggctctgagaaggggaggtgctgacacatacagtgtgcccagcgtcctctccccgcgccgggcagctaccgaaaggccccttggacctcccacagagagaaccaggtctttccagttggcagtggagacttttcaccagcagcaccctcaggtcatagatgtggatgaagttgaggaaacaggagttgttttcagctataacacggattcccgccagacgtgtgctaacaacagacaccagtgctcggtgcacgcagagtgcagggactacgccacgggcttctgctgcagctgtgtcgctggctatacgggcaatggcaggcaatgtgttgcagaaggttccccccagcgagtcaatggcaaggtgaaaggaaggatctttgtggggagcagccaggtccccattgtctttgagaacactgacctccactcttacgtagtaatgaaccacgggcgctcctacacagccatcagcaccattcccgagaccgttggatattctctgcttccactggccccagttggaggcatcattggatggatgtttgcagtggagcaggacggattcaagaatgggttcagcatcaccgggggtgagttcactcgccaggctgaggtgaccttcgtggggcacccgggcaatctggtcattaagcagcggttcagcggcatcgatgagcatgggcacctgaccatcgacacggagctggagggccgcgtgccgcagattccgttcggctcctccgtgcacattgagccctacacggagctgtaccactactccacctcagtgatcacttcctcctccacccgggagtacacggtgactgagcccgagcgagatggggcatctccttcacgcatctacacttaccagtggcgccagaccatcaccttccaggaatgcgtccacgatgactcccggccagccctgcccagcacccagcagctctcggtggacagcgtgttcgtcctgtacaaccaggaggagaagatcttgcgctatgctctcagcaactccattgggcctgtgagggaaggctcccctgatgctcttcagaatccctgctacatcggcactcatgggtgtgacaccaacgcggcctgtcgccctggtcccaggacacagttcacctgcgagtgctccatcggcttccgaggagacgggcgaacctgctatgatattgatgaatgttcagaacaaccctcagtgtgtgggagccacacaatctgcaataatcacccaggaaccttccgctgcgagtgtgtggagggctaccagttttcagatgagggaacgtgtgtggctgtcgtggaccagcgccccatcaactactgtgaaactggccttcataactgcgacataccccagcgggcccagtgtatctacacaggaggctcctcctacacctgttcctgcttgccaggcttttctggggatggccaagcctgccaagatgtagatgaatgccagccaagccgatgtcaccctgacgccttctgctacaacactccaggctctttcacgtgccagtgcaaacctggttatcagggagacggcttccgttgcgtgcccggagaggtggagaaaacccggtgccagcacgagcgagaacacattctcggggcagcgggggcgacagacccacagcgacccattcctccggggctgttcgttcctgagtgcgatgcgcacgggcactacgcgcccacccagtgccacggcagcaccggctactgctggtgcgtggatcgcgacggccgcgaggtggagggcaccaggaccaggcccgggatgacgcccccgtgtctgagtacagtggctcccccgattcaccaaggacctgcggtgcctaccgccgtgatccccttgcctcctgggacccatttactctttgcccagactgggaagattgagcgcctgcccctggagggaaataccatgaggaagacagaagcaaaggcgttccttcatgtcccggctaaagtcatcattggactggcctttgactgcgtggacaagatggtttactggacggacatcactgagccttccattgggagagctagtctacatggtggagagccaaccaccatcattagacaagatcttggaagtccagaaggtatcgctgttgatcaccttggccgcaacatcttctggacagactctaacctggatcgaatagaagtggcgaagctggacggcacgcagcgccgggtgctctttgagactgacttggtgaatcccagaggcattgtaacggattccgtgagagggaacctttactggacagactggaacagagataaccccaagattgaaacttcctacatggacggcacgaaccggaggatccttgtgcaggatgacctgggcttgcccaatggactgaccttcgatgcgttctcatctcagctctgctgggtggatgcaggcaccaatcgggcggaatgcctgaaccccagtcagcccagcagacgcaaggctctcgaagggctccagtatccttttgctgtgacgagctacgggaagaatctgtatttcacagactggaagatgaattccgtggttgctctcgatcttgcaatttccaaggagacggatgctttccaaccccacaagcagacccggctgtatggcatcaccacggccctgtctcagtgtccgcaaggccataactactgctcagtgaacaatggcggctgcacccacctatgcttggccaccccagggagcaggacctgccgttgccctgacaacaccttgggagttgactgtatcgaacagaaatgaagacaagagtgccttatttcctttccaagtatttcacagcaacactctacttgaagcaacttggtccagattgaaaagtgtcctctggctgagtggccactaggcccagacccagcccagcctgagccccaacaacttttccctcactgttccccaaaacatgcaccctggacttctctaatagaaaagtctccacccctacacaaggacagaaccctccacccctacccccaaccctcagacagacttatacacccctgagtgaggattacatgcccatcccagtgtcctaggaccttttcccaatactagccccccagtggtgaacagaacctcccaaatttgagttgcacccttccctgtggccttatgagctcagcctcgctttgaggtacccaccgtcctgtcagctccttgacctatgagccggggcctgactaggaaaagttgggagttaaggaggaaattagcattccttaatgttttgttttggtgctctgaatttcttctttattatagtcctatagttttactcctcagttcctcaccatcatcatcttgtctaagacccccattataatattcatgcgctgctttttcatcaaaacctaccctgtcctagagatctatgggcatttggtggatgataatgagcagcccctcccagatagaatgtcaatatttgagcagtaggatattggcatttgttagttaaaggcttaaatcaaaagaatgtccaatggtaggaatttcaaggtgtaggtcagatatttgagaataggggatttttttgatgtgccttaaattataccaaagattactaattattcctctttgcccaaaatacttgcatccaaggttctagtctctgttgctgtgctggtctttagccccactgcttgcactgatgtccctccttttcacggagacctatctgaggtacaggatggggctggcaccagatgatgtcccaccacagtccctcacctccggcctccacatgacagaaccaatttacactcaaccatgacctcacccctccttggtttctccctcgatctgtggccctttttggatgtattcttatctaacaacacaatccggaaagactgaattgaatatttatactaatggttcatatcctttattgctcaatgatctaattaaagggatcattgccacatttcatgtttatatttctacaatttgtttagaaaacatctcctgaccatatcagtagctcgtgttatctttttatcaactgcttcccagagtcctaaaacaatagaaattttggattgaaaagttcagcataaggagtttgagtcagtaaaggatgggataaaggagtcgagatgattcaatgaaaagtatcacaaaaaagagattgatcaacaagagaaataaaaaagcccaagaggaagtggtaggggaaggaatttaagaacagcaataagtaaaactcttaagtaactccaaaaagaaaatggtacattttgccaaagaccacttatacttgagaacatggaagaatttgcctgatactctctttggggaaaagagtctctcctcttttcctcaaaccccagtacactcagcctctctgccccaccttctcctgactttgtcctcacttgcttctgcagtacattggaacctgaattgaaagaaagtcttccttgaataattggagtttgtcttgagaggcaaatatagccccaagaatcacaagattcgaggaccatgtaggtcttttacgtagcccaaatccataaattagtctcactttttgtatttatcgtttcatattaaaccctctatatcaaatgttcatcatgattttgtatgatttttataactattttattcattttattagatttattctaaaattttttaatggtaaattcttaaactgtggaaaccactgaaggtgcttattaactgttctcccagatttgtacaagtattggatgattccttgagtttacagctgtacaaatagtgtggaaaataaactttttttaaaaaagaaaaaaaaaaaaaaaaaaaaaaaa

SEQ ID NO: 783 - protein, 1247 aa, Homo Sapiens
MLASSSRIRAAWTRALLLPLLLAGPVGCLSRQELFPFGPGQGDLELEDGDDFVSPALELSGALRFYDRSDIDAVYVTTNGIIATSEPPAKESHPGLFPPTFGAVAPFLADLDTTDGLGKVYYREDLSPSITQRAAECVHRGFPEISFQPSSAVVVTWESVAPYQGPSRDPDQKGKRNTFQAVLASSDSSSYAIFLYPEDGLQFHTTFSKKENNQVPAVVAFSQGSVGFLWKSNGAYNIFANDRESVENLAKSSNSGQQGVWVFEIGSPATTNGVVPADVILGTEDGAEYDDEDEDYDLATTRLGLEDVGTTPFSYKALRRGGADTYSVPSVLSPRRAATERPLGPPTERTRSFQLAVETFHQQHPQVIDVDEVEETGVVFSYNTDSRQTCANNRHQCSVHAECRDYATGFCCSCVAGYTGNGRQCVAEGSPQRVNGKVKGRIFVGSSQVPIVFENTDLHSYVVMNHGRSYTAISTIPETVGYSLLPLAPVGGIIGWMFAVEQDGFKNGFSITGGEFTRQAEVTFVGHPGNLVIKQRFSGIDEHGHLTIDTELEGRVPQIPFGSSVHIEPYTELYHYSTSVITSSSTREYTVTEPERDGASPSRIYTYQWRQTITFQECVHDDSRPALPSTQQLSVDSVFVLYNQEEKILRYALSNSIGPVREGSPDALQNPCYIGTHGCDTNAACRPGPRTQFTCECSIGFRGDGRTCYDIDECSEQPSVCGSHTICNNHPGTFRCECVEGYQFSDEGTCVAVVDQRPINYCETGLHNCDIPQRAQCIYTGGSSYTCSCLPGFSGDGQACQDVDECQPSRCHPDAFCYNTPGSFTCQCKPGYQGDGFRCVPGEVEKTRCQHEREHILGAAGATDPQRPIPPGLFVPECDAHGHYAPTQCHGSTGYCWCVDRDGREVEGTRTRPGMTPPCLSTVAPPIHQGPAVPTAVIPLPPGTHLLFAQTGKIERLPLEGNTMRKTEAKAFLHVPAKVIIGLAFDCVDKMVYWTDITEPSIGRASLHGGEPTTIIRQDLGSPEGIAVDHLGRNIFWTDSNLDRIEVAKLDGTQRRVLFETDLVNPRGIVTDSVRGNLYWTDWNRDNPKIETSYMDGTNRRILVQDDLGLPNGLTFDAFSSQLCWVDAGTNRAECLNPSQPSRRKALEGLQYPFAVTSYGKNLYFTDWKMNSVVALDLAISKETDAFQPHKQTRLYGITTALSQCPQGHNYCSVNNGGCTHLCLATPGSRTCRCPDNTLGVDCIEQK

SEQ ID NO: 784 - DNA, 6352 bp, Homo Sapiens
aaagctgtcgcccctctctcggatgctcaggctgggcagcgctggacagatgggtacaccccgggcctgacggatgaacagtcgggcaagtgaactctcacctccaaactggctctgcgcccggcgggggcggcggcggcgtctgcagccccgcggtgggggcagccccctcggtctacgcccgactgctgcgcgccgcctctgctcttggcatagtaatttcagttcctgaacgcacggagctcgctccgggaccgggctgagaaggacctcagctcgcgggcccgccggagccatcggtgtggcgccgagagacggtgcttgggatatgcgacgggaagcccccgccacagcgcaggcagtggccccgccgcgccgcggagccgggcagagcaggctggttcttcagaggaatcatccctgactgtgtcatcactctgagctctgactgcgctcccctcccccaccagtgggaccagtactcaagagagctctggagtgctcctgaagagaaattccatggggactgtacctgaccctctgagatcagctaaaacttccctgattgcagcttccggaaaagaagacgatctaggagagccacaggctgcctcacctcggcatcgaccagctctcctgtgtaagaatgccaatggcttttcaggtgcccctgcagaaccagacctcagccccagggcagctgccgaagccctgatgcaggtttgtgagcatgagaccacccaaccagatatgtcttctcctggtgtgttcaatgaagtgcagaaagcacctgccacattcaactctcccggcaatccccagctgccagggagcagccagcccgcagcatcagccccgagttctgcagcaggaagggatcttatacacacaccattgacaatgcccgccaatcagcacacctgccagtccatcccaggtgatcagcccaatgccatcacctcatccatgcctgaagattccctgatgagatcacagagaacctcaaatagagagcaacctgagaaaccaagttgtcctgtgggaggcgtcctcagtagcagcaaagatcaggtgtcctgtgagtttccttctccagaaacaatccagggaacagtgcagactccagtgacagcagccagggtggtcagtcactcatcctctcctgtaggtggacctgaaggggaaaggcagggagccatctgtgactctgaaatgaggtcctgtaaacctctaactagagaatctggatgttcagagaacaagcagccctctgtcactgcctcgggcccccaaggcacaacttctgtgacacctcaaccaacccccctcactagcgaaccttcggcatgtcccccaggtccagagaaggtgccgctgccagcacagcgtcagatgtcaaggttcaaagaagccagtacgatgaccaaccaagctgaaagtgaaatcaaggaagttcccagcagggcttggcaagatgcggaggtgcaggcagtggcgagtgtcgagagcagatccgtctccaccagccccagtatcctcactgcatttctgaaggaaagccgtgctcctgagcattttgaacaagagcagctgcgtgtcatttgccacagcagtgggagccacacactggagctctctgacagcacgctagccccccaggagtccagccagtgccctggcatcatgccacaggtgcacattcaggcagctgcagctgagtctacagctttccaacgggaaaataaacttgcgagcctaccaggtggggtccttaaaacctcatcaatcaatttggtctccagtaatgcccagcatacgtgtaaagaagatgggaggttagcaggaatgactccagtgagggaagagtcaactgctaaaaagctcgcaggtactaattctagctccctgaaagctaccgccattgaccagatttctatcagtgcatgcagtcaagctgaaacaagttatggattggggaaatttgaaaccaggccatctgagtttgcagagaaaacgacaaacggccacaaaacagacccagattgcaaactatctgactcttgtggctctatcagcaaagctgatcattctgggagcttggatcccactaataaaggagatgcaagggaaaagaagcctgcatctcctcaggtagtaaaagaaaaagagtctactggcactgatacctcggatgccaaaaccctactgctcaatcctaaatcccaagaaagtggaggcacagaatcagctgctaatcctacaccctccccaattaggaagaaccaggagagcaccttagaagaaaacagacagaccaagacagccaccagcctgagcctgccatctgatcccatgggtgactccagcccaggttctggcaagaagaccccatctcgctccgtcaaagccagcccacgcaggcccagccgcgtcagcgagttcctcaaggagcaaaagttaaatgtgacagcagctgctgctcaggtaggactcactccaggagataagaaaaagcagcttggcgcagactccaagctccagctgaaacagtccaagcgtgtcagggacgtcgtgtgggatgagcagggaatgacctgggaagtgtatggtgcatccttggacgcagagtccctgggaatcgcgatccagaaccatttgcaaagacaaatcagggaacatgagaaattaatcaaaactcaaaatagccagacccggagatccatttcctcagatacttcttcaaataagaagctcagaggaaggcagcacagtgttttccagtccatgctgcagaacttccgacgccccaactgctgcgtccgtcctgccccgtcttctgtgttagattgaaagggagtatttatgggagtttgtgtataaatttacggtattcacatgcgtccctctatgtcaaagcttgcttagttttttgctgcaagactaggaagaaaaagcaagtattcactataggaaattgctattaaaaattgttagatcctttgacctggagctctataaacaaaaatgtcatttcaatttgaaagaaggaacaagaaaagagaaacaagcttcactgaaggtttgcaaccttaacaaattgaaaataatactcactgggtttttaaaaatatgatgttgttcatagaaatagcattattgtatcattatacatgtattattttgtataactgcctcaatttatcacacagtagtagttccattaaaatccctgcttcatattgaaagtagcaaaaacactattggcgaaaacattgttataatttctagtcttattgcagtaagaatgctgtaaccacacaaattataaataggtgataagaaccataatgaaaaaaatgagaacatatttgattcattcctaggccagataacattaaataaaaacagttaaatgtgtaaaatatgaaatatgaattaatgtttataaacatctgcagacaactctttttataaaccttcttattgctgttaataaatataagaaagttatattaggaacattagctaagcttttgactatgaaaactgcctacattaaacatggatttatatagacccattttcctgcactgaaggcaaggcgcatctctgtgattctgaccagacatattcatattttcttaccctagaggaagtacatgggactgaattcttgaaaagagccatcaaattagggataatactaaattgatactgtgcaggtgttctccagtgatattctactgagaatgctaaggttctggtcaggaactataaatagcagattaccaaacactgctttttctgtgatgataaaagcctcataagtaacaaaaacaatgtttaatttagactcctgtaaacaggatgcaattagtgattttttttaattgggttcagtaacttccagtaacaaatgtagtcaacaccaaattagaatgtgagcttccttacaatttttgtacatagactactatcatctaattgcttaaatatatatgctggagtaaaaaggtaacttctgcaaacttattgattttaagagaaatacccataatatccttcaaacccaatgaaagaagaggcctttacgaaaacatggcttgtgatttgggtggattatacttcctgggaccttggccctcccgtgtctccagaagagacgtgtgtcccgagacacatgagtatcctccaaggcactggcctggatgagcagcatcgccttgagaattggggtagtgtggaaaggaagaatgaacaacggccctgggaagccttcccttcctgcagatattgttgggggagtgctggtctccattttgcgtttagaaaaccagacttagatgctggaggggcaccggttgtcttctttgaactcattccccgtaatgagctagaaaagagtacctaaccataggtattctctctagagactcatgtgtcccgtgggtacagtcaattcacagtatctgttctggcttttttcactttaattctgttctgcacattctgaacatatgcaggaaaaaaaatcattcctgaacttagcacaagctacactcgacacaacctaaattagtaaaaagcctttgatttattttgaagcaatttaactgtagacaaagcttgcatatatggaacagtattctcagagcctgagagttgttacagttgttctatttggaaattagaaggaattttttaataaggcacatttttcagtttcttacccattggtgtctattaagaatactatgtaatgttgaaatttccatcaaattaccaagcaaattactattaatgattagagatttagcctaacactctctctttgggccttaaatacccatttgtagttgtgttcgtgtcacttctgtctcagatgcctctgccaggacataatctctctaactcttgctagctggcttctccctcccacatgggcatacatgctgtgtatacacagagtacagcctgtgtacacagtagcagctgtcaacagggcctactccagatgggtggccccaggtaatcctctgctgtaaagtggctagaacaggctgtccctgcattaaaataggtgagaataaggaatttcgcctctgataataatatttattttcatgactttagagtaaccacatgatttgtaaacagttaaatgaagcagaggcctgagagagttgttggcatttgtctcacattaaatacattaaaattgctagatttgctattgtggttatgtctatcaaaactttaagaaaatttgtttaatgtactgagtttaactgattttctttggtgctgggaccaaattcttcacttctacaacactcaagagattgtcacaaaatattacaaaaatattgtttgttttgtggctcattaaaccctatataactaacagcttttaaggacattaacagaaatatatcttcagatggataaataagatagggacctattcaagacagcagcatttttgtattgtgatacctcccctaagttactctcacaataaaaccttatttgagaattttccttcacttcaatctgtgacatagcattaggcatttagtataccttatttgtgaaacctaaggttcattcaacagatgaagctgcaaaacagttttcttggtagactcttggaacttgctcagttttttccttactttacctgcatgacacacattgggttgaaagttgtttggttttacccttcatttctcttagatatgatttggttctttttcatgcattatatttttgaaatatatggaggaaatattttattgaatcaagaaatagaaaatattccttaaaccagtagtaaaaaggtgagttagaactccatgtctggaagacaattcaacatttaaaatattaagatgctataccacttaacaagtgaatactaaaatttttaatttaaagattgattgttctgtttttatgaccatgagaaaaatgtgacagcttcagctgtcatatgtttatcttgaatgcttttctaattatgtatttctggattattgactttgaatgccacagaccaactactttacatagagtaaaatattgattaacctttgtgctttgggtcactggcaaaagttgaacatcctgataagtcaatgttaaccagaaacctttttgttcacgtctgaaattgaatatttataaaatgtgttagtatgtttcctgccttgataagttcacctatattgaatgtaatttgatctttgataattttttttaatcttgagaattctctgatactgttttgaataccagtgttcaccatgttataaagttaaacataaaaattgaaataaattgaactaaatat

SEQ ID NO: 785 - protein, 776 aa, Homo Sapiens
MGTVPDPLRSAKTSLIAASGKEDDLGEPQAASPRHRPALLCKNANGFSGAPAEPDLSPRAAAEALMQVCEHETTQPDMSSPGVFNEVQKAPATFNSPGNPQLPGSSQPAASAPSSAAGRDLIHTPLTMPANQHTCQSIPGDQPNAITSSMPEDSLMRSQRTSNREQPEKPSCPVGGVLSSSKDQVSCEFPSPETIQGTVQTPVTAARVVSHSSSPVGGPEGERQGAICDSEMRSCKPLTRESGCSENKQPSVTASGPQGTTSVTPQPTPLTSEPSACPPGPEKVPLPAQRQMSRFKEASTMTNQAESEIKEVPSRAWQDAEVQAVASVESRSVSTSPSILTAFLKESRAPEHFEQEQLRVICHSSGSHTLELSDSTLAPQESSQCPGIMPQVHIQAAAAESTAFQRENKLASLPGGVLKTSSINLVSSNAQHTCKEDGRLAGMTPVREESTAKKLAGTNSSSLKATAIDQISISACSQAETSYGLGKFETRPSEFAEKTTNGHKTDPDCKLSDSCGSISKADHSGSLDPTNKGDAREKKPASPQVVKEKESTGTDTSDAKTLLLNPKSQESGGTESAANPTPSPIRKNQESTLEENRQTKTATSLSLPSDPMGDSSPGSGKKTPSRSVKASPRRPSRVSEFLKEQKLNVTAAAAQVGLTPGDKKKQLGADSKLQLKQSKRVRDVVWDEQGMTWEVYGASLDAESLGIAIQNHLQRQIREHEKLIKTQNSQTRRSISSDTSSNKKLRGRQHSVFQSMLQNFRRPNCCVRPAPSSVLD

SEQ ID NO: 786 - DNA, 1900 bp, Homo Sapiens
agccgcggggagcgaggagcgcgcggagccggccatgggcaagtcagcttccaaacagtttcataatgaggtcctgaaggcccacaatgagtaccggcagaagcacggcgtccccccactgaagctctgcaagaacctcaaccgggaggctcaacagtattctgaggccctggccagcacgaggatcctcaagcacagcccggagtccagccgtggccagtgtggggagaaccttgcatgggcatcctatgatcagacaggaaaggaggtggctgatagatggtacagtgaaatcaagaactataacttccagcagcctggcttcacctcggggactggacacttcacggccatggtatggaagaacaccaagaagatgggcgtggggaaggcgtccgcaagtgacgggtcctcctttgtggtggccagatacttcccagcggggaatgttgtcaatgagggcttcttcgaagaaaacgtcctgccgccgaagaagtaacttgttaaatgtaatgggaaggtggcagacttaagaacgtggatatgaagtgcctagaaccaccacaacctggctgtgcgtctgtccctgtgggtgtatgtgcttgtgtgtgtgatgcatgtgagcgtctctggcacacacacttggacatacagttctgtgtgcgctcattcttattacaggagtgagcaaaggaagcatttaccccgatggttacctagaccacgattatttggattggggggaggggggatccgttttttttttttaattttttgttatttctaagcaaacctcttttgtacttttcttacttctaatatccatccctggactttttgtattccaaatgtttgtgatgctgagaagtgaagttcattttatgtgatcttcatgcgtcgtaatctacttttggtagataattaagattattaaaccctcatttaaatgtgacataaaatacagctttaagcacataaatataaagcagcttccatcaggaacatggagcaggcagggactccattttacagaattactgagatttctcagttgtaaaacatgatgtcatcctgcatgcctcctggaattctccaatggggtcgccaaacaacaaatggagaaaaaaagttttacttccttgcattcttctacctttaaatagcaaagtaccactaccaccaccacctcttgcccccttccctcttttcttaaacttctggcatttcagagctcagcaggctacccctggtttctggagagttgggctaggcctgaagctccccctcccccacctctgctaggcagcccaggcctggtctgggagacagcccctcaccctgcctgggctcttggccaagcggccttggatggatgaagtcagagaggtggggtgagggtgagcttactcagggcccccagaggaagccctcagcctctgccctccccccacacagggcgggagcccaggcctgttcctggcagctgtggctgcagctgtgctcctgctccctcctggaatgtgcgacaagcccaaatgttccagggaggcggccggggcagggggcttagaagtgctaatatggttctgtgttttgcctgaaacgataccaggttcccctgaatagcaactttacaaggtccatgtgggagggaccaacccagatgccctgctgagtgtccctgaaaccatggcagctccatctgtcaagatggcaggggccggagtgagggggctgctggcttaacagcaggcatctgggcaggccagtcctcaaagcagctcctgaaggtctgtgttgcactgtcaccagtctcaagctatgcctctaatttcaccagggatattgactaagaagacaataaaatctttttctttgtgtaaaaaaaaaaaaaaaaaaa

SEQ ID NO: 787 - protein, 154 aa, Homo Sapiens
MGKSASKQFHNEVLKAHNEYRQKHGVPPLKLCKNLNREAQQYSEALASTRILKHSPESSRGQCGENLAWASYDQTGKEVADRWYSEIKNYNFQQPGFTSGTGHFTAMVWKNTKKMGVGKASASDGSSFVVARYFPAGNVVNEGFFEENVLPPKK

SEQ ID NO: 788 - DNA, 6972 bp, Homo Sapiens
gagagtccggggatcccgggggccagtcgcggccgggacatcgggcgctgcggccggggacccgctgctgagatagacagaatatggcagagctttctgagccagagggaccagtagattggaaggaacgatgtgtagctctggagtcccaactcatgaaatttagagttcaagcaagcaagatacgagagcttttagcagagaagatgcaacagcttgagagacaagttattgatgctgaacgtcaagcagaaaaagcttttcaacaggtacaagttatggaagataaattaaaagcagctaatattcaaaccagtgaatcagagacaagattatataataagtgtcaagatctggagtcgctaatacaggaaaaagatgacgtcattcaaaacttggaattgcaacttgaagagcagaaacaaataagaatacaagaagctaaaataatagaagagaaagcagctaagataaaagaatgggtaacagttaagttaaatgagctggaattggagaatcagaatcttcgtttgatcaaccaaaaccaaactgaagagataagaacaatgcagtcaaaactacaagaagttcaaggaaagaagtcatccactgtctctacactaaagctttcggaaggccagcgcctgagcagtttgacctttgggtgctttttatctcgagcaaggagtcctcctcaagtagtaaaatctgaggaaatgagcaagatatcatcgaaagaacctgagttcactgaaggaaaagacatggaagaaatggaaattccagaaaagtctgttgataaccaagttctagaaaacaacagaggccagagaacattgcatcaaaccccttgtggctcagaacagaatcggaaaacaagaacaagctttgccacagatggtggcatctcccagaattctggggctcctgtgagtgactggagctctgatgaggaagacgggagcaaaggaagatccaagtccagatgcacatccaccctctccagtcacacatctgaggaaggggtccagtgtagcaggatgggaagtgaaatgtatctgacagcatctgatgacagcagctctatatttgaggaagagacttttggcataaagagaccagaacacaagaagctatattcttggcagcaggaggcacagtggaaagctctaaatagtcctcttggaaagggaaattctgaattaagtaaaaaggaacaagatagttcctcggatgaactgaataaaaaatttcaatcccagagactcgattattcatcttcatcgagtgaagccaacaccccaagccctattttgaccccagctttaatgccaaagcatcctaactcactctctggaaaaggaacacaattagtgccttcatcacacctgccacccccaaagttaaggattcctaatgttttcagtataagtgtagcactagccaaaaggcacttaagccagccacagttaagctctgacaggatgtttggtacaaatagaaacgctataagcatgatacgaccactgagacctcaggaaactgatcttgatctagttgatggagacagtacagaagttttagagaatatggacacgagttgtgatgatggattattttcctatgactccttggactctccaaattcagatgaccaggaacactgtgactcagcaaagaaggtggcatacagcaaacctccaactcctcccctgcaccgttttccttcttgggaaagcagaatttatgctgtagccaaatcaggtattcgaatgtctgaggccttcaatatggagagtgttaataaaaattctgctgcaaccctttcctatactacatcaggactttatacatctctgatatacaagaacatgaccaccccagtgtatacaactttgaaggggaaggcgacccaaataagtagcagccctttcctggatgactcatctgggtcagaggaagaagacagctccagatccagctcccggacgtcagagtcagactcacgcagtaggagtgggccaggcagccccagagccatgaaacgaggtgtgtctctctcctctgtggcttctgaaagtgattatgctattcctcctgatgcttactccacagacacggagtactcacagccagagcagaagctcccaaaaacttgctcatcttccagtgataatgggaaaaatgaaccactggaaaaatctggttatttattaaaaatgagtggtaaagtcaagtcttggaagcggcggtggtttgttcttaaaggtggtgaattactttactacaaatctccgagtgatgtaattagaaaaccccagggccatattgaacttagtgcatcctgtagtattttaagaggagataacaaacaaacagttcagttgaccactgaaaaacacacatactatctgactgcagattctcccaatatattggaagagtggattaaagtgttacagaatgttcttcgagtacaagctgccaacccactttccctgcagcctgagggcaaacccaccatgaagggattgctcactaaggtaaaacatggatattccaagagagtctggtgtacactaataggaaagacattatattattttcggagtcaagaagataagtttcctttaggtcagatcaaactctgggaggctaaagtggaagaggttgacagatcttgtgattcagatgaagattatgaagccagtggacgaagtctgttatccacacattatactatcgttatccatcccaaagaccaaggtccaacttacctcctaattggatccaagcatgaaaaggacacttggctttatcatctgactgttgcagctggaagcaacaatgtaaacgttggatctgaatttgaacaactggtttgcaaattgctaaatatagacggggagccttcctctcagatatggagacaccccactttgtgtcacagtaaagaaggaatcatttcccctctgacaactctaccttccgaagccctgcagacagaagctattaaattatttaagacctgccagctttttataaatgctgcagttgactctcctgcaattgattaccacatatctttagcccagagtgctttgcaaatctgcctgacacatcctgagctgcagaatgaaatttgctgtcagcttattaaacagacaagacgaagacagccacagaatcaaccaggaccattgcagggctggcagctcttggcactctgcgttgggctcttccttccccatcatcctttcctgtggctcctcaggcttcacctaaagaggaatgcagattccaggacagaatttggaaaatatgccatttactgccagcgttgtgtagaaagaacgcaacaaaatggtgacagagaagcaagaccctcaaggatggaaattctttcaactcttctccgaaacccttatcaccattctttgccctttagtatacctgtgcacttcatgaatgggatataccaggtagttggttttgacgcatctaccacagtggaagaatttttgaatactttgaaccaggacacaggaatgaggaaaccagcgcagtctggatttgcgttgttcactgacgatccttctggcagagatttagagcattgtcttcaaggaaacatcaagatttgtgacattatttccaaatgggaacaggcttccaaagaacagcagcctggaaaatgtgaaggtacaaggactgttcgtctgacatacaaaaacagactatatttctcagtgcaagctcgtggagagactgatagagaaaagttgctgttaatgtatcagacaaatgatcaaatcataaatggactttttcctctgaacaaagatctggcattagaaatggcagctcttttatctcaggtagagattggagattttgaaagacctttctcaactccagcagggcatgttaccaatcagtgcaaagtgaatcaaactctaaagcaagtcatagagaaattttatcctaaaaggtatagagatggctgttctgaagagcagttaaggcagctttgccagcgactttcaaccagatggatggccctccggggacacagtgctgctgactgtgtgcgcatttatttgacagtagccaggaagtggccattctttggtgccaagttgtttcttgcaaaacccataactccatcatcacttggaagtactttcttgtggctggctgtacatgaggatggtttaagcctcttagaatacaactccatgaggttaatagtcagctatgtgtacaagagtctaatgacctttggaggctatcaagatgattttatggtagtcattaacaatacacattcaaaggacaaaccaacagagaaattactttttgccatggcaaaacccaagattcttgaaatcactcttttgatcgccagttacataaacaacttccatcagcaaaaggcagcatttcaccacctctctgctccagcactgctctcagcccagacccggggaccccaagccagaatgatgggaagccagcctcttctgtcaagcagcagaccgaccaaaggccccaccttactctgaaagctggggagcctgaacattcactccttgtcctccatgctgtggctgtatcagctccctacaagttcgtttacacctggcagcacggcagccacacaccggtattccaaaccttaacaatgaagggggttagtctcttttatttgattcttaaatattcaaataaatattaacagtaaaacataaacacaaaatttgccaacacactaattttcttatagagtaaatgagtaagaattcatcattttttccatctcccttctcccttgtcatcagacacattgtgcaatgtggcttttcttttcttttctttttttcccctttttaatattctggcaatctttagaaagggagattccaaactcccatttggtaaaccagttgattatttggaaatgttcactgccaaaatagtaagtgctataactaaatgcgcttttaattaatgatatagtgtttggaaaggagtagaacatgcagcataagaaactgctgcagagtggtgcgaggagtacattttcagagcaggtgcagtacatcttccggctctatgaatcattatgtgagaaagcaggataacattaggtaacctgagcctcctgtgtggtattagaaagtataccgtcaccttttcacatcactggagtgtaaaatttaaaacaagatggtgattcctgacattccttggctgtcagtgctgcccagattcagaagaatattgcccacatttcactgtatttggtgctgggtcattttgaccttgctttgttaataatatctttaaaaacaaagacaatccttaaagctttgctcctcacacattaccttctaattatagtttgaaaatagattccctacacatacatacatatgtatgcacagatagggtcttgctatgttgcccaggctggtcttgaactcctggcctcaagcaatcctctctcctcagcctcccaaagtgctgggattacaagtgtgagccaccacacctggctccagaaattttattttatttttttgaggcagggtctcactctggttgcccaggctggagtgcagtggtgccatcatagctcactgtagcctcgaccttccgggatcaagcaatcccacttcagcctcttgaatagctgggactagaagcatgcaccaccatgcccatctaatatttgtatttttagtagagacaggatctccctatgttgtccagcctagtctcaaactcctgggttcaagcaatcctcccacctcggcctcccaaagtgctgggattgcaggcatgagccaccgtgcccagcctcaaaaatattttttaaaagaaaagagaaaataattcttctgtcaaaggaggttaaattttagttgatagagtacttaaatgcattactttattaggttatgtaagtggtcagtgcattccagtatgtgtcacaacagtgtagttcatattcatgataaaaatgaaactgtgataagacatgaaaattatattattaaaatgttcaattgtaatggtaatcatgagtatacttaattttatttatgtatagaatatttgtatttattttttggacatatatttatcactttgtcattttttttaaccaatttgagaaatgttagctgctgaattaatttgttgcccgagccttcatattttcttctttgctgccttctccctgtggcaatgtactgttctcacattaagccttttaaaaatgttccatactgtattagcatccttagaagggacagaactaagaaatacattgctcaaataatattttactttattgataatgacaaaaagaatattttttaaaccccatcaaaatagatttcaattgactgtttcccctacatcttttgagccacagtcgcccatcgaataagcaaatttgtttttgagaataaactggtaaccagtttgtgatgactctcagaagccttttggctgggttacagaagagtttctaagttcctagagagccatttaataattagttggtgagccagaggcttgacagagctgttacttatgtgtgagggctttattctcaggcagtagtttattcatcatttggtaagcccctccccacactcctctaatttaaacaagtagtgaaggcttatcttaaactgtgtagtaccttagacttggcatttatttttgatagagcagagataaaatattttgatggaaggaaatcaattttctgtaactgatgatgtgaaaattttattttctgggaaattatatagccattcaaaaattcaaagtatgttattatgattggttacaagagaataatgttacatgtttaattgtaatatttgtctcctatcattttcttccctttcagtcataataaatgatttacaaaacccaaaaaaaaaaaaaaaaaaa

SEQ ID NO: 789 - protein, 1493 aa, Homo Sapiens
MAELSEPEGPVDWKERCVALESQLMKFRVQASKIRELLAEKMQQLERQVIDAERQAEKAFQQVQVMEDKLKAANIQTSESETRLYNKCQDLESLIQEKDDVIQNLELQLEEQKQIRIQEAKIIEEKAAKIKEWVTVKLNELELENQNLRLINQNQTEEIRTMQSKLQEVQGKKSSTVSTLKLSEGQRLSSLTFGCFLSRARSPPQVVKSEEMSKISSKEPEFTEGKDMEEMEIPEKSVDNQVLENNRGQRTLHQTPCGSEQNRKTRTSFATDGGISQNSGAPVSDWSSDEEDGSKGRSKSRCTSTLSSHTSEEGVQCSRMGSEMYLTASDDSSSIFEEETFGIKRPEHKKLYSWQQEAQWKALNSPLGKGNSELSKKEQDSSSDELNKKFQSQRLDYSSSSSEANTPSPILTPALMPKHPNSLSGKGTQLVPSSHLPPPKLRIPNVFSISVALAKRHLSQPQLSSDRMFGTNRNAISMIRPLRPQETDLDLVDGDSTEVLENMDTSCDDGLFSYDSLDSPNSDDQEHCDSAKKVAYSKPPTPPLHRFPSWESRIYAVAKSGIRMSEAFNMESVNKNSAATLSYTTSGLYTSLIYKNMTTPVYTTLKGKATQISSSPFLDDSSGSEEEDSSRSSSRTSESDSRSRSGPGSPRAMKRGVSLSSVASESDYAIPPDAYSTDTEYSQPEQKLPKTCSSSSDNGKNEPLEKSGYLLKMSGKVKSWKRRWFVLKGGELLYYKSPSDVIRKPQGHIELSASCSILRGDNKQTVQLTTEKHTYYLTADSPNILEEWIKVLQNVLRVQAANPLSLQPEGKPTMKGLLTKVKHGYSKRVWCTLIGKTLYYFRSQEDKFPLGQIKLWEAKVEEVDRSCDSDEDYEASGRSLLSTHYTIVIHPKDQGPTYLLIGSKHEKDTWLYHLTVAAGSNNVNVGSEFEQLVCKLLNIDGEPSSQIWRHPTLCHSKEGIISPLTTLPSEALQTEAIKLFKTCQLFINAAVDSPAIDYHISLAQSALQICLTHPELQNEICCQLIKQTRRRQPQNQPGPLQGWQLLALCVGLFLPHHPFLWLLRLHLKRNADSRTEFGKYAIYCQRCVERTQQNGDREARPSRMEILSTLLRNPYHHSLPFSIPVHFMNGIYQVVGFDASTTVEEFLNTLNQDTGMRKPAQSGFALFTDDPSGRDLEHCLQGNIKICDIISKWEQASKEQQPGKCEGTRTVRLTYKNRLYFSVQARGETDREKLLLMYQTNDQIINGLFPLNKDLALEMAALLSQVEIGDFERPFSTPAGHVTNQCKVNQTLKQVIEKFYPKRYRDGCSEEQLRQLCQRLSTRWMALRGHSAADCVRIYLTVARKWPFFGAKLFLAKPITPSSLGSTFLWLAVHEDGLSLLEYNSMRLIVSYVYKSLMTFGGYQDDFMVVINNTHSKDKPTEKLLFAMAKPKILEITLLIASYINNFHQQKAAFHHLSAPALLSAQTRGPQARMMGSQPLLSSSRPTKGPTLL

SEQ ID NO: 790 - DNA, 3632 bp, Homo Sapiens
actcactgcccgggccgcccggacagggagcttcgctggcgcgcttggccggcgacaggacaggttcgggacgtccatctgtccatccgtccggagagaaattacagatccgcagccccgggatggggccggccccgctgccgctgctgctgggcctcttcctccccgcgctctggcgtagagctatcactgaggcaagggaagaagccaagccttacccgctattcccgggaccttttccagggagcctgcaaactgaccacacaccgctgttatcccttcctcacgccagtgggtaccagcctgccttgatgttttcaccaacccagcctggaagaccacatacaggaaacgtagccattccccaggtgacctctgtcgaatcaaagcccctaccgcctcttgccttcaaacacacagttggacacataatactttctgaacataaaggtgtcaaatttaattgctcaatcagtgtacctaatatataccaggacaccacaatttcttggtggaaagatgggaaggaattgcttggggcacatcatgcaattacacagttttatccagatgatgaagttacagcaataatcgcttccttcagcataaccagtgtgcagcgttcagacaatgggtcgtatatctgtaagatgaaaataaacaatgaagagatcgtgtctgatcccatctacatcgaagtacaaggacttcctcactttactaagcagcctgagagcatgaatgtcaccagaaacacagccttcaacctcacctgtcaggctgtgggcccgcctgagcccgtcaacattttctgggttcaaaacagtagccgtgttaacgaacagcctgaaaaatccccctccgtgctaactgttccaggcctgacggagatggcggtcttcagttgtgaggcccacaatgacaaagggctgaccgtgtccaagggagtgcagatcaacatcaaagcaattccctccccaccaactgaagtcagcatccgtaacagcactgcacacagcattctgatctcctgggttcctggttttgatggatactccccgttcaggaattgcagcattcaggtcaaggaagctgatccgctgagtaatggctcagtcatgatttttaacacctctgccttaccacatctgtaccaaatcaagcagctgcaagccctggctaattacagcattggtgtttcctgcatgaatgaaataggctggtctgcagtgagcccttggattctagccagcacgactgaaggagccccatcagtagcacctttaaatgtcactgtgtttctgaatgaatctagtgataatgtggacatcagatggatgaagcctccgactaagcagcaggatggagaactggtgggctaccggatatcccacgtgtggcagagtgcagggatttccaaagagctcttggaggaagttggccagaatggcagccgagctcggatctctgttcaagtccacaatgctacgtgcacagtgaggattgcagccgtcaccagagggggagttgggcccttcagtgatccagtgaaaatatttatccctgcacacggttgggtagattatgccccctcttcaactccggcgcctggcaacgcagatcctgtgctcatcatctttggctgcttttgtggatttattttgattgggttgattttatacatctccttggccatcagaaaaagagtccaggagacaaagtttgggaatgcattcacagaggaggattctgaattagtggtgaattatatagcaaagaaatccttctgtcggcgagccattgaacttaccttacatagcttgggagtcagtgaggaactacaaaataaactagaagatgttgtgattgacaggaatcttctaattcttggaaaaattctgggtgaaggagagtttgggtctgtaatggaaggaaatcttaagcaggaagatgggacctctctgaaagtggcagtgaagaccatgaagttggacaactcttcacagcgggagatcgaggagtttctcagtgaggcagcgtgcatgaaagacttcagccacccaaatgtcattcgacttctaggtgtgtgtatagaaatgagctctcaaggcatcccaaagcccatggtaattttacccttcatgaaatacggggacctgcatacttacttactttattcccgattggagacaggaccaaagcatattcctctgcagacactattgaagttcatggtggatattgccctgggaatggagtatctgagcaacaggaattttcttcatcgagatttagctgctcgaaactgcatgttgcgagatgacatgactgtctgtgttgcggacttcggcctctctaagaagatttacagtggcgattattaccgccaaggccgcattgctaagatgcctgttaaatggatcgccatagaaagtcttgcagaccgagtctacacaagtaaaagtgatgtgtgggcatttggcgtgaccatgtgggaaatagctacgcggggaatgactccctatcctggggtccagaaccatgagatgtatgactatcttctccatggccacaggttgaagcagcccgaagactgcctggatgaactgtatgaaataatgtactcttgctggagaaccgatcccttagaccgccccaccttttcagtattgaggctgcagctagaaaaactcttagaaagtttgcctgacgttcggaaccaagcagacgttatttacgtcaatacacagttgctggagagctctgagggcctggcccagggctccacccttgctccactggacttgaacatcgaccctgactctataattgcctcctgcactccccgcgctgccatcagtgtggtcacagcagaagttcatgacagcaaacctcatgaaggacggtacatcctgaatgggggcagtgaggaatgggaagatctgacttctgccccctctgctgcagtcacagctgaaaagaacagtgttttaccgggggagagacttgttaggaatggggtctcctggtcccattcgagcatgctgcccttgggaagctcattgcccgatgaacttttgtttgctgacgactcctcagaaggctcagaagtcctgatgtgaggagaggtgcggggagacattccaaaaatcaagccaattcttctgctgtaggagaatccaattgtacctgatgtttttggtatttgtcttccttaccaagtgaactccatggccccaaagcaccagatgaatgttgttaagtaagctgtcattaaaaatacataatatatatttatttaaagagaaaaaatatgtgtatatcatggaaaaagacaaggatattttaataaaacattacttatttcatttcacttatcttgcatatcttaaaattaagcttcagctgctccttgatattaacatttgtacagagttgaagttgttttttcaagttcttttctttttcatgactattaaatgtaaaaatatttgtaaaatgaaatgccatatttgacttggcttctggtcttgatgtatttgataagaatgattcattcaatgtttaaagttgtataactgattaattttctgatatggcttcctaataaaatatgaataaggaagaaaaaa

SEQ ID NO: 791 - protein, 999 aa, Homo Sapiens
MGPAPLPLLLGLFLPALWRRAITEAREEAKPYPLFPGPFPGSLQTDHTPLLSLPHASGYQPALMFSPTQPGRPHTGNVAIPQVTSVESKPLPPLAFKHTVGHIILSEHKGVKFNCSISVPNIYQDTTISWWKDGKELLGAHHAITQFYPDDEVTAIIASFSITSVQRSDNGSYICKMKINNEEIVSDPIYIEVQGLPHFTKQPESMNVTRNTAFNLTCQAVGPPEPVNIFWVQNSSRVNEQPEKSPSVLTVPGLTEMAVFSCEAHNDKGLTVSKGVQINIKAIPSPPTEVSIRNSTAHSILISWVPGFDGYSPFRNCSIQVKEADPLSNGSVMIFNTSALPHLYQIKQLQALANYSIGVSCMNEIGWSAVSPWILASTTEGAPSVAPLNVTVFLNESSDNVDIRWMKPPTKQQDGELVGYRISHVWQSAGISKELLEEVGQNGSRARISVQVHNATCTVRIAAVTRGGVGPFSDPVKIFIPAHGWVDYAPSSTPAPGNADPVLIIFGCFCGFILIGLILYISLAIRKRVQETKFGNAFTEEDSELVVNYIAKKSFCRRAIELTLHSLGVSEELQNKLEDVVIDRNLLILGKILGEGEFGSVMEGNLKQEDGTSLKVAVKTMKLDNSSQREIEEFLSEAACMKDFSHPNVIRLLGVCIEMSSQGIPKPMVILPFMKYGDLHTYLLYSRLETGPKHIPLQTLLKFMVDIALGMEYLSNRNFLHRDLAARNCMLRDDMTVCVADFGLSKKIYSGDYYRQGRIAKMPVKWIAIESLADRVYTSKSDVWAFGVTMWEIATRGMTPYPGVQNHEMYDYLLHGHRLKQPEDCLDELYEIMYSCWRTDPLDRPTFSVLRLQLEKLLESLPDVRNQADVIYVNTQLLESSEGLAQGSTLAPLDLNIDPDSIIASCTPRAAISVVTAEVHDSKPHEGRYILNGGSEEWEDLTSAPSAAVTAEKNSVLPGERLVRNGVSWSHSSMLPLGSSLPDELLFADDSSEGSEVLM

SEQ ID NO: 792 - DNA, 2937 bp, Homo Sapiens; identical to SEQ ID NO: 710

SEQ ID NO: 793 - protein, 978 aa, Homo Sapiens; identical to SEQ ID NO: 552

SEQ ID NO: 794 - DNA, 6998 bp, Homo Sapiens
agccgccggggaggggacgagacgcagaccacacgttgcccacgtgcgaggaccgggcaggggctcagcccctaggccgcccggtgcgtggggcggcgggggctggctttgagtcacccccgcttgtgccagcttccccggctcggcggagactggcttggggatgcctggccgcccggcccccttctcggacgcggcgtggggagcgagctggagttaaggatgaaggggcggccggcgagtcccagtgagagcggagggtgccagaggtagggggccgagaaacaaagttcccggggcttcctccggggccgcggtcggggctgcgcgtttgaccgcccccctcctcgcgaaggcaatggcttccaaactcctgcgcgcggtcatcctcgggccgcccggctcgggcaagggcaccgtgtgccagaggatcgcccagaactttggtctccagcatctctccagcggccacttcttgcgggagaacatcaaggccagcaccgaagttggtgagatggcaaagcagtatatagagaaaagtcttttggttccagaccatgtgatcacacgcctaatgatgtccgagttggagaacaggcgtggccagcactggctccttgatggttttcctaggacattaggacaagccgaagccctggacaaaatctgtgaagtggatctagtgatcagtttgaatattccatttgaaacacttaaagatcgtctcagccgccgttggattcaccctcctagcggaagggtatataacctggacttcaatccacctcatgtacatggtattgatgacgtcactggtgaaccgttagtccagcaggaggatgataaacccgaagcagttgctgccaggctaagacagtacaaagacgtggcaaagccagtcattgaattatacaagagccgaggagtgctccaccaattttccggaacggagacgaacaaaatctggccctacgtttacacacttttctcaaacaagatcacacctattcagtccaaagaagcatattgaccctgcccaatggaagaaccaggaagatgtggtcattcattcaatagtgtgtgtagtattggtgctgtgtccaaattagaagctagctgaggtagcttgcagcatcttttctagttgaaatggtgaactgataggaaaacaaatgagtagaaagagttcatgaagaggccctcctctgcctttcaaaaggctggtcacctacacatgtttaaggtgtctctgcacatgtctcaagcccatcacaagaaagcaagtacagtgtggatttcaaatggtgtgtaacttcagctccagctggtttttgacagctgttgctgtggtaatatttttgacatgtgatggtgatagtctctggttctccccatccccacaaaggctgttgaaccacagcaccaggaagcctgagaatgaatcctgagggctctagcccaggctttgtcccaggctttctggtgtgtgccctcctggtaacagtgaaattgaagctacttactcatagtggttgtttctctggtcttgagtgactgtgtccacagttcatttttttccggtaggaataactccttttctacatccacgctccatagagtctctccttttcagacatcctgggatgaaagaatttggcttttttttttctttttttttttggacatctgttttcactcttaggcttttaaacaatagttattgcttttatccctctcagattctaataactgagagcgatggggctatattgaatctctgtatgcactgagaactgagctatgaagaggatcttattaaactgctggtctgactttatggattgacactgttcctttcttttattgtgaaaaaaaaaaaaaaccctgaaagtcttgggaaccccctaaagtcttttgggaatcctcaaaaagcatgggaagttaagtatttagctacataaatgttgtaagatcatatcttatgtatagaagtaataagaccatttggaattactggactaattgaatagttaaggtttctattcgggacaataaaatgtattttgaaagtgctgctaactattgatgctgacagtgtttcactcctatgagtgacccaaacatattataaatatgtggtaaagggaatggagcctgtggggttgagcagaatgttgtactagctgtgcctggactgagtataacagctttatgattatgagaaaacaaattctttattttttttttctgttccaaagattcatcctatggggtggccataaagtctagaattagatactaatattttgtcattcattataacatatcaataaaccatttgttaaaagatttgcctggtttccagacttggtggccaccttgaataattcttgctgtcttctgggaaggatgatgaaatttattcctgctgccttaaaaatatgtatcccttcttcacccatcatgactgtccccagtgagtgtcctttactattcttgggagtgactcctgtctaacttttcatactggcgagaagaaaagaagcctattttaacactttagtggtgttgaaacacattacttactttctgaagatgtcccagtgaatcctctgtcaattcactgccatatgtaatctatatgataaggaatgcatcttccttctaagtactgcccaaactcttgccagctcctctcccattgtcccttcatgtgaatatttcttggctaccttagtggaaatatagatcagttttctccccatccatcctctcaaacataatgagattgtttactttttagatttatgcagtgaaaatgcccagtcaggtctgaatcgtcagtgcattatattgactctgagcactttagaatttagagttgcaattgaatgccagctgtggagatggggtgcatatcagatatataaataaagctcaggtttgctagggaaccaggtatagagaaaaataagtctgatatgaggaaaattgcacaatttagagtagttatgccgtagagaaaatttccacaaactaggaaatgtagagagttattctatagaatactcaaaagaggaaagtatgtgatttttggaaacaggaaaatcttcaaacttctttcttcacttccctttgtgtttagctgaccctccaatgtgatcattgcctttggagtttgggagaggtacgggaagtggcctgatccctgcttccatacttcactcctccatccatccttccctccctcttcccctccagctaaatggacaattctagccaacattgagtcactcaataagtctcaacagtgggtgtgtttgctgagattgtccagcggttgagcagtttggtctcacctccctcgctagttgagaccaaaaagagacaaataactttttcatggtctttgaaacataatgcttatttcgtggtcaatggctttaaaaaaatctgtttcttgttttcttcaacaaactcactagttttcccttaaatgatattgtaaaaattaaagtaatcttgaaaatgttttgacaaaagtaaaattaaagggacatcttttcttgttttgttttttttttttctattgccacacatgaccgttccttcacctttaagcaaagagagtggttcagatggtttctaagatgccaacctgacctcgcattctgtcattctacccagctcttaattcaatttgcttccattatcctaacaggcttctttcttacttagaacttggaaaggctgctgtatttaataccctccaacactaacgcagacttaagataggtactgtttattgaaaacctactgagtgaaatgtgcggttttaggaccttcataaacatctcatttaatctttctagcatcctgtgaaacagccatgatttcacgttgataaacaaagaagacaggggtcccagggatgtgaagcatcttgcccaggcttctgctgctggtgaccagtgtagccaggactccagcccaggttttcctgactcagaagactgagctttttcctggatgttattaatagctaattgtgtccaagcaaccaagggccttgagtctgcttggttctgcttatggcctcacatcaagaaatggagctagtccatgtctgtagtcccaatgctttgggaagccatgatgggaaggttgtcggaggccaaaagttcaagaccaggctgggcaatatcacaagactccatctctacggaaaagtaaaaaattagccagtcatggtggtgtacacttatggtcctagttactcaggagacttaggcaggaggattgcttgatcctaggaattcgaggctgcagtgagctatgattgcacctctgcacccaagcctgggcgacacagcgagaccctctctcttaaaaaaaaaaaatagcagagctcaccaaagtgatgttcacctttttatgacattcctttttcttagcttaagaaaagaaagctgctagatgagagtcttagttttcctgcataagacctcctttatgaatagaataaaagactgtcaaagtaggctgggcttgggcccaggctaatctatgaaggaagcaagctcgtgttccttacctatccttttggtgtccattggattgtgccccgaagtggcctttacccttgagccgtccccagccatggtgctcacacataggcttttgagctccttggagctatccagatcctgctcacttttccttcctgagatcagaacaaatcacccccttactcccactccaaacaaggccttgatgataaactaatccttcctaaaatgctggtaggtaaacaagcaatgatgaagcattgaacacaggttaactcctgacttttgtaccattgtctattccattacacattaacatgactctgaatgccagatccaaacctttgcccaccatctgcttgtcgtgcaacagttgaggcagtaaccaggggagattcacttcctgtcttgtccttccccagggatcacccccctgctgccctctagcagccaaactcagatgagttccattgttaccctaggtgtgcccatctctttggtagggaaggagaaaggtaagaatagccatcagtgaggaaggattcttggagcgaggagccactgtggtttttcctgctatttaagatgttgagaccggataactttagaaagatacctgcacaaacccataaatagtgcttttataaagtttagttcaccggaacctgagttcagtatttgacattagctttttgtccaaagagttgaagcctgctggaggtctttgctcaaataataaataccacatatttccaagtgtgttcaggtataggcactaggtactgtctgtttacttcatgttaggcacattacatgcattggctaatcaaatcctcatcaattacatatgtaataatctaaacttgcctccttgtattataaatggaaataatcctgtttatttaaacgggttttcatgtacctgtagggattaggaaactcaaatggcctttttaatacctttccctagtttgagctccctgttctctttaacagataaaacaacatatttgcttcagcctggaatctgtttttggtgctttggtgcagagacaggaaatgggcactcagagtcacactggtagttgcacactgtatctacagagggcgtgtctcatctgtactctgctgggttacaggatttcagtaggtatttgtgtccacctgagaattctgtttattacctttcatttgacagtgtctttcctttctgcagttgattttgctagagaggcaattcataaggtgaggtcctgttcatagtatgacttgctttctcaatatctccttcaatttttagtaactcttggtctatttggtgtctttaaaaaaaataacctagtaataaagacttcttttaatgtggaaatgtggtctggtagtaagttatttctttccacatgtaactgacccaatctggtttccaaatgagaagtgtgcaggccccagaggttgagaagccatatttcaactgtgaaaaaaatctgcttcctgcatctgttgaaatatagttgttcatacttgccatcccttatctttcttgtaacaatttgcacagttcttgccagaataaatgccattatctgtatgtttcagggagttccccaatttgatcatttttgtgtgtgtgtggtgtgtgtgtgagagagagagatactgcagtaaaacatttctaaaggatgaaagctcttgtatggcatagatatgaattccttcctctggtaataattaggttattcccagaagcacagtgtcattctttaaataaaagctttcctgtttaaagcttttcaaaggagcagaccaccttgaagattccccctagggttgatatgtgtctaattcattttataaaaattattcttgtcttcattttaaagctttggctatatagtcagaaatgtcctaaataacaaactattttgtatttaatttagggaagactaaagggaagaaaaatgaaaactcagtctttatgtaagctccaaggatattagggcttaaagggcttttctagttttatgagaatttgtactactgatttttatatattcctgtttttgagatgaacagatctctggggaaattgttgagttacaatggcatttcactgtgatccctctcaagctcagatcagttctataacccaatgacaacctgtctctttggtttactgtcctgtgaaatgtcagctcaagtttcccagaagtcgtgtgtttatgatgagtcagagtgcttttcctcggtgggacagttgctggccctcttaattttggtgtatgtgcttccaagtatctaaacctccagtctgatctgtatatgctatcctaactgttaattgtattattgattatgttgattatcttgcttgaaggttcatacttttcaatttgatagaaataaagtttttttctgcttatagctagcgaa

SEQ ID NO: 795 - protein, 223 aa, Homo Sapiens
MASKLLRAVILGPPGSGKGTVCQRIAQNFGLQHLSSGHFLRENIKASTEVGEMAKQYIEKSLLVPDHVITRLMMSELENRRGQHWLLDGFPRTLGQAEALDKICEVDLVISLNIPFETLKDRLSRRWIHPPSGRVYNLDFNPPHVHGIDDVTGEPLVQQEDDKPEAVAARLRQYKDVAKPVIELYKSRGVLHQFSGTETNKIWPYVYTLFSNKITPIQSKEAY

SEQ ID NO: 796 - DNA, 4402 bp, Homo Sapiens
cgtaacccaggcagctggggagcctgggctgtggccctaggagggggcgcggcggcgggctctctccttttgttgttgtttcctcagcctggggagctgaaggggagacgcgtctgggtggggctgctcggagcccgggcctggtggcccctggggctcccgggcgggcagggtagggcagagtagagcgggcttcaacatgatggcggccgaggccggcagtgaggagggcggcccggtaacagccggagctggaggaggcggcgcggcagcgggctccagtgcctatcccgcagtgtgtcgggtgaagatacccgcggccctgcctgtggcagccgccccctatcctgggctggtggagaccggagtggctggaactctgggtggcggagccgctttggggtcagagttcctaggagccgggtctgtggcaggggcactggggggagctggactgacagggggaggtactgctgctggcgtagctggtgctgctgctggcgtggccggtgctgctgttgctggacctagtggagacatggctctcaccaaactgcccacttcgttgcttgctgagactctcgggccaggcggcggttttccccctctgccccctcccccttacctgccccctttgggggcgggcctcgggacagtggacgaaggtgactctctggatggaccagaatacgaggaggaagaggtggccataccgttgaccgctcctccaactaaccagtggtatcacggaaaacttgacagaacgatagcagaagaacgcctcaggcaggcagggaagtctggcagttatcttataagagagagtgatcggaggccagggtcctttgtactttcatttcttagccagatgaatgttgtcaaccattttaggattattgctatgtgtggagattactacattggtggaagacgtttttcttcactgtcagacctaataggttattacagtcatgtttcttgtttgcttaaaggagaaaaattactttacccagttgcaccaccagagccagtagaagatagaaggcgtgtacgagctattctaccttacacaaaagtaccagacactgatgaaataagtttcttaaaaggagatatgttcattgttcataatgaattagaagatggatggatgtgggttacaaatttaagaacagatgaacaaggccttattgttgaagacctagtagaagaggtgggccgggaagaagatccacatgaaggaaaaatatggttccatgggaagatttccaaacaggaagcttataatttactaatgacagttggtcaagtctgcagttttcttgtgaggccctcagataatactcctggcgattattcactttatttccggaccaatgaaaatattcagcgatttaaaatatgtccaacgccaaacaatcagtttatgatgggaggccggtattataacagcattggggacatcatagatcactatcgaaaagaacagattgttgaaggatattatcttaaggaacctgtaccaatgcaggatcaagaacaagtactcaatgacacagtggatggcaaggaaatctataataccatccgtcgtaaaacaaaggatgccttttataaaaacattgttaagaaaggttatcttctgaaaaagggcaaaggaaaacgttggaaaaatttatattttatcttagagggtagtgatgcccaacttatttattttgaaagcgaaaaacgagctaccaaaccaaaaggattaatagatctcagtgtatgttctgtctatgtcgttcatgatagtctctttggcaggccaaactgttttcagatagtagttcagcactttagtgaagaacattacatcttttactttgcaggagaaactccagaacaagcagaggattggatgaaaggtctgcaggcattttgcaatttacggaaaagtagtccagggacatccaataaacgccttcgtcaggtcagcagccttgttttacatattgaagaagcccataaactcccagtaaaacattttactaatccatattgtaacatctacctgaatagtgtccaagtagcaaaaactcatgcaagggaagggcaaaacccagtatggtcagaagagtttgtctttgatgatcttcctcctgacatcaatagatttgaaataactcttagtaataaaacaaagaaaagcaaagatcctgatatcttatttatgcgctgccagttgagccgattacagaaagggcatgccacagatgaatggtttctgctcagctcccatataccattaaaaggtattgaaccagggtccctgcgtgttcgagcacgatactctatggaaaaaatcatgccagaagaagagtacagtgaatttaaagagcttatactgcaaaaggaacttcatgtagtctatgctttatcacatgtatgtggacaagaccgaacactactggccagcatcctactgaggatttttcttcacgaaaagcttgaatcgttgttgttatgcacactaaatgacagagaaataagcatggaagatgaagccactaccctatttcgagccacaacacttgcaagcaccttgatggagcagtatatgaaagccactgctacacagtttgttcatcatgctttgaaagactctattttaaagataatggaaagcaagcagtcttgtgagttaagtccatcaaagttagaaaaaaatgaagatgtgaacactaatttaacacacctattgaacatactttcagagcttgtggagaaaatattcatggcttcagaaatacttccaccgacattgagatatatttatgggtgtttacagaaatctgttcagcataagtggcctacaaataccaccatgagaacaagagttgttagtggttttgtttttcttcgactcatctgtcctgccatcctgaatccacggatgttcaatatcatctcagattctccatctcctattgctgcaagaacactgatattagtggctaaatctgtgcagaacttagcaaatcttgtggaatttggagctaaggagccctacatggaaggtgtcaatccattcatcaaaagcaacaaacatcgtatgatcatgtttttagatgaacttgggaatgtacctgaacttccggacactacagagcattctagaacggacctgtcccgtgatttagcagcattgcatgagatttgcgtggctcattcagatgaacttcgaacgctcagtaatgagcgtggtgcacagcagcacgtattgaaaaagcttctggctataacagaactgcttcaacaaaaacaaaaccagtatacaaaaaccaatgatgtcaggtagcagccttcgccccagtgttctgcatggattcagcatgtccaacatggtaattcacttcagtttaatgtctcctttgctcttgccaaaaaatagcacacttttccacattccagtgatgtgtgagctatgcaaacaaaatccaagattctgctggtgaataactatgccagcaaccttgtaagctatctgtgcaggatatttgcactatttccacatggaatcaatctttaacaacctctgagccttggtgtacagaccacctttcacaaaacgaaatgctatgactgtatcttgatatctcgaactttcaaaatatattttcagtacacccagttgccaaagttttgctgtctcttagagaaagaactatgaaatcaactgacaagaaacacattcttattgacaattgtgtataactggattgcagactgttcttactgtaactacttcctgattaggaatatgaccatttgactgttcaatgattatttgtatttacagtttccagagtttgtcattataataggaacaatctttgctgtatacttttaaaaaatactctgctatttctcttgctggaactgttgaaagaaaatatatagaatgatctattgctcatcagctttattttttaaacatacgacttattttgttgaaattgtcaaagactgtatttagatctcataatgctttgttaaatgtttacaagtaaatagtttgaattcagtaaatattattggttgttgtattgatcaatgcatgttacccattcaaccattttatagactaccaatttcttttatgttaactagaatgcttttgttaaaagttatttgttcattatttgtgctacccctttgattatgcagacaacctcatcagctgcctaacttatccatctttgaacttctgactacttgttgtatctgctggatatttagttcaactgtatagttttatttacttctgtatgtgtatttttgtgaagtattcacaaaggttaagttaaaataaaaccaagggatatcttgcataattgattaaaaaaaaaaaaaaaaa

SEQ ID NO: 797 - protein, 1047 aa, Homo Sapiens
MMAAEAGSEEGGPVTAGAGGGGAAAGSSAYPAVCRVKIPAALPVAAAPYPGLVETGVAGTLGGGAALGSEFLGAGSVAGALGGAGLTGGGTAAGVAGAAAGVAGAAVAGPSGDMALTKLPTSLLAETLGPGGGFPPLPPPPYLPPLGAGLGTVDEGDSLDGPEYEEEEVAIPLTAPPTNQWYHGKLDRTIAEERLRQAGKSGSYLIRESDRRPGSFVLSFLSQMNVVNHFRIIAMCGDYYIGGRRFSSLSDLIGYYSHVSCLLKGEKLLYPVAPPEPVEDRRRVRAILPYTKVPDTDEISFLKGDMFIVHNELEDGWMWVTNLRTDEQGLIVEDLVEEVGREEDPHEGKIWFHGKISKQEAYNLLMTVGQVCSFLVRPSDNTPGDYSLYFRTNENIQRFKICPTPNNQFMMGGRYYNSIGDIIDHYRKEQIVEGYYLKEPVPMQDQEQVLNDTVDGKEIYNTIRRKTKDAFYKNIVKKGYLLKKGKGKRWKNLYFILEGSDAQLIYFESEKRATKPKGLIDLSVCSVYVVHDSLFGRPNCFQIVVQHFSEEHYIFYFAGETPEQAEDWMKGLQAFCNLRKSSPGTSNKRLRQVSSLVLHIEEAHKLPVKHFTNPYCNIYLNSVQVAKTHAREGQNPVWSEEFVFDDLPPDINRFEITLSNKTKKSKDPDILFMRCQLSRLQKGHATDEWFLLSSHIPLKGIEPGSLRVRARYSMEKIMPEEEYSEFKELILQKELHVVYALSHVCGQDRTLLASILLRIFLHEKLESLLLCTLNDREISMEDEATTLFRATTLASTLMEQYMKATATQFVHHALKDSILKIMESKQSCELSPSKLEKNEDVNTNLTHLLNILSELVEKIFMASEILPPTLRYIYGCLQKSVQHKWPTNTTMRTRVVSGFVFLRLICPAILNPRMFNIISDSPSPIAARTLILVAKSVQNLANLVEFGAKEPYMEGVNPFIKSNKHRMIMFLDELGNVPELPDTTEHSRTDLSRDLAALHEICVAHSDELRTLSNERGAQQHVLKKLLAITELLQQKQNQYTKTNDVR

SEQ ID NO: 798 - DNA, 2344 bp, Homo Sapiens
ggtgcgtccgcgggtggctgccccgcaggtgcgcgcggccggggctggcggcgactctctccaccgggccgcccgggaggctcatgcagcgcggctgggtcccgcggcgcccggatcggggaagtgaaagtgcctcggaggaggagggccggtccggcagtgcagccgcctcacaggtcggcggacgggccaggcgggcggcctcctgaaccgaaccgaatcggctcctcgggccgtcgtcctcccgcccctcctcgcccgccgccggagttttctttcggtttcttccaagattcctggccttccctcgacggagccgggcccagtgcgggggcgcagggcgcgggagctccacctcctcggctttccctgcgtccagaggctggcatggcgcgggccgagtactgagcgcacggtcggggcacagcagggccggggggtgcagctggctcgcgcctcctctccggccgccgtctcctccggtccccggcgaaagccattgagacaccagctggacgtcacgcgccggagcatgtctgggagtcagagcgaggtggctccatccccgcagagtccgcggagccccgagatgggacgggacttgcggcccgggtcccgcgtgctcctgctcctgcttctgctcctgctggtgtacctgactcagccaggcaatggcaacgagggcagcgtcactggaagttgttattgtggtaaaagaatttcttccgactccccgccatcggttcagttcatgaatcgtctccggaaacacctgagagcttaccatcggtgtctatactacacgaggttccagctcctttcctggagcgtgtgtgggggcaacaaggacccatgggttcaggaattgatgagctgtcttgatctcaaagaatgtggacatgcttactcggggattgtggcccaccagaagcatttacttcctaccagccccccaatttctcaggcctcagagggggcatcttcagatatccacacccctgcccagatgctcctgtccaccttgcagtccactcagcgccccaccctcccagtaggatcactgtcctcggacaaagagctcactcgtcccaatgaaaccaccattcacactgcgggccacagtctggcagctgggcctgaggctggggagaaccagaagcagccggaaaaaaatgctggtcccacagccaggacatcagccacagtgccagtcctgtgcctcctggccatcatcttcatcctcaccgcagccctttcctatgtgctgtgcaagaggaggagggggcagtcaccgcagtcctctccagatctgccggttcattatatacctgtggcacctgactctaatacctgagccaagaatggaagcttgtgaggagacggactctatgttgcccaggctgttatggaactcctgagtcaagtgatcctcccaccttggcctctgaaggtgcgaggattataggcgtcacctaccacatccagcctacacgtatttgttaatatctaacataggactaaccagccactgccctctcttaggcccctcatttaaaaacggttatactataaaatctgcttttcacactgggtgataataacttggacaaattctatgtgtattttgttttgttttgctttgctttgttttgagacggagtctcgctctgtcatccaggctggagtgcagtggcatgatctcggctcactgcaacccccatctcccaggttcaagcgattctcctgcctcctcctgagtagctgggactacaggtgctcaccaccacacccggctaattttttgtatttttagtagagacggggtttcaccatgttgaccaggctggtctcgaactcctgacctggtgatctgcccacccaggcctcccaaagtgctgggattaaaggtgtgagccaccatgcctggccctatgtgtgttttttaactactaaaaattatttttgtaatgattgagtcttctttatggaaacaactggcctcagcccttgcgcccttactgtgattcctggcttcattttttgctgatggttccccctcgtcccaaatctctctcccagtacaccagttgttcctcccccacctcagccctctcctgcatcctcctgtacccgcaacgaaggcctgggctttcccaccctccctccttagcaggtgccgtgctgggacaccatacgggttggtttcacctcctcagtcccttgcctaccccagtgagagtctgatcttgtttttattgttattgcttttattattattgcttttattatcattaaaactctagttcttgttttgtctctccgaaaaaaaaaaaaaaaaaaaaaa

SEQ ID NO: 799 - protein, 273 aa, Homo Sapiens
MSGSQSEVAPSPQSPRSPEMGRDLRPGSRVLLLLLLLLLVYLTQPGNGNEGSVTGSCYCGKRISSDSPPSVQFMNRLRKHLRAYHRCLYYTRFQLLSWSVCGGNKDPWVQELMSCLDLKECGHAYSGIVAHQKHLLPTSPPISQASEGASSDIHTPAQMLLSTLQSTQRPTLPVGSLSSDKELTRPNETTIHTAGHSLAAGPEAGENQKQPEKNAGPTARTSATVPVLCLLAIIFILTAALSYVLCKRRRGQSPQSSPDLPVHYIPVAPDSNT

SEQ ID NO: 800 - DNA, 4743 bp, Homo Sapiens
gggaaggaggcaggggtgctgagaaggcggctgctgggcagagccggtggcaagggcctcccctgccgctgtgccaggcaggcagtgccaaatccggggagcctggagctggggggagggccggggacagcccggccctgccccctcccccgctgggagcccaacaacttctgaggaaagtttggcacccatggcgtggcggtgccccaggatgggcagggtcccgctggcctggtgcttggcgctgtgcggctgggcgtgcatggcccccaggggcacgcaggctgaagaaagtcccttcgtgggcaacccagggaatatcacaggtgcccggggactcacgggcacccttcggtgtcagctccaggttcagggagagccccccgaggtacattggcttcgggatggacagatcctggagctcgcggacagcacccagacccaggtgcccctgggtgaggatgaacaggatgactggatagtggtcagccagctcagaatcacctccctgcagctttccgacacgggacagtaccagtgtttggtgtttctgggacatcagaccttcgtgtcccagcctggctatgttgggctggagggcttgccttacttcctggaggagcccgaagacaggactgtggccgccaacacccccttcaacctgagctgccaagctcagggacccccagagcccgtggacctactctggctccaggatgctgtccccctggccacggctccaggtcacggcccccagcgcagcctgcatgttccagggctgaacaagacatcctctttctcctgcgaagcccataacgccaagggggtcaccacatcccgcacagccaccatcacagtgctcccccagcagccccgtaacctccacctggtctcccgccaacccacggagctggaggtggcttggactccaggcctgagcggcatctaccccctgacccactgcaccctgcaggctgtgctgtcagacgatgggatgggcatccaggcgggagaaccagaccccccagaggagcccctcacctcgcaagcatccgtgcccccccatcagcttcggctaggcagcctccatcctcacaccccttatcacatccgcgtggcatgcaccagcagccagggcccctcatcctggacccactggcttcctgtggagacgccggagggagtgcccctgggcccccctgagaacattagtgctacgcggaatgggagccaggccttcgtgcattggcaagagccccgggcgcccctgcagggtaccctgttagggtaccggctggcgtatcaaggccaggacaccccagaggtgctaatggacatagggctaaggcaagaggtgaccctggagctgcagggggacgggtctgtgtccaatctgacagtgtgtgtggcagcctacactgctgctggggatggaccctggagcctcccagtacccctggaggcctggcgcccagggcaagcacagccagtccaccagctggtgaaggaaccttcaactcctgccttctcgtggccctggtggtatgtactgctaggagcagtcgtggccgctgcctgtgtcctcatcttggctctcttccttgtccaccggcgaaagaaggagacccgttatggagaagtgtttgaaccaacagtggaaagaggtgaactggtagtcaggtaccgcgtgcgcaagtcctacagtcgtcggaccactgaagctaccttgaacagcctgggcatcagtgaagagctgaaggagaagctgcgggatgtgatggtggaccggcacaaggtggccctggggaagactctgggagagggagagtttggagctgtgatggaaggccagctcaaccaggacgactccatcctcaaggtggctgtgaagacgatgaagattgccatctgcacgaggtcagagctggaggatttcctgagtgaagcggtctgcatgaaggaatttgaccatcccaacgtcatgaggctcatcggtgtctgtttccagggttctgaacgagagagcttcccagcacctgtggtcatcttacctttcatgaaacatggagacctacacagcttcctcctctattcccggctcggggaccagccagtgtacctgcccactcagatgctagtgaagttcatggcagacatcgccagtggcatggagtatctgagtaccaagagattcatacaccgggacctggcggccaggaactgcatgctgaatgagaacatgtccgtgtgtgtggcggacttcgggctctccaagaagatctacaatggggactactaccgccagggacgtatcgccaagatgccagtcaagtggattgccattgagagtctagctgaccgtgtctacaccagcaagagcgatgtgtggtccttcggggtgacaatgtgggagattgccacaagaggccaaaccccatatccgggcgtggagaacagcgagatttatgactatctgcgccagggaaatcgcctgaagcagcctgcggactgtctggatggactgtatgccttgatgtcgcggtgctgggagctaaatccccaggaccggccaagttttacagagctgcgggaagatttggagaacacactgaaggccttgcctcctgcccaggagcctgacgaaatcctctatgtcaacatggatgagggtggaggttatcctgaaccccctggagctgcaggaggagctgaccccccaacccagccagaccctaaggattcctgtagctgcctcactgcggctgaggtccatcctgctggacgctatgtcctctgcccttccacaacccctagccccgctcagcctgctgataggggctccccagcagccccagggcaggaggatggtgcctgagacaaccctccacctggtactccctctcaggatccaagctaagcactgccactggggaaaactccaccttcccactttcccaccccacgccttatccccacttgcagccctgtcttcctacctatcccacctccatcccagacaggtccctccccttctctgtgcagtagcatcaccttgaaagcagtagcatcaccatctgtaaaaggaaggggttggattgcaatatctgaagccctcccaggtgttaacattccaagactctagagtccaaggtttaaagagtctagattcaaaggttctaggtttcaaagatgctgtgagtctttggttctaaggacctgaaattccaaagtctctaattctattaaagtgctaaggttctaaggcctactttttttttttttttttttttttttttttttgcgatagagtctcactgtgtcacccaggctggagtgcagtggtgcaatctcgcctcactgcaaccttcacctaccgagttcaagtgattttcctgccttggcctcccaagtagctgggattacaggtgtgtgccaccacacccggctaatttttatatttttagtagagacagggtttcaccatgttggccaggctggtctaaaactcctgacctcaagtgatctgcccacctcagcctcccaaagtgctgagattacaggcatgagccactgcactcaaccttaagacctactgttctaaagctctgacattatgtggttttagattttctggttctaacatttttgataaagcctcaaggttttaggttctaaagttctaagattctgattttaggagctaaggctctatgagtctagatgtttattcttctagagttcagagtccttaaaatgtaagattatagattctaaagattctatagttctagacatggaggttctaaggcctaggattctaaaatgtgatgttctaaggctctgagagtctagattctctggctgtaaggctctagatcataaggcttcaaaatgttatcttctcaagttctaagattctaatgatgatcaattatagtttctgaggctttatgataatagattctcttgtataagatcctagatcctaagggtcgaaagctctagaatctgcaattcaaaagttccaagagtctaaagatggagtttctaaggtccggtgttctaagatgtgatattctaagacttactctaagatcttagattctctgtgtctaagattctagatcagatgctccaagattctagatgattaaataagattctaacggtctgttctgtttcaaggcactctagattccattggtccaagattccggatcctaagcatctaagttataagactctcacactcagttgtgactaactagacaccaaagttctaataatttctaatgttggacacctttaggttctttgctgcattctgcctctctaggaccatggttaagagtccaagaatccacatttctaaaatcttatagttctaggcactgtagttctaagactcaaatgttctaagtttctaagattctaaaggtccacaggtctagactattaggtgcaatttcaaggttctaaccctatactgtagtattctttggggtgcccctctccttcttagctatcattgcttcctcctccccaactgtgggggtgtgcccccttcaagcctgtgcaatgcattagggatgcctcctttcccgcaggggatggacgatctcccacctttcgggccatgttgcccccgtgagccaatccctcaccttctgagtacagagtgtggactctggtgcctccagaggggctcaggtcacataaaactttgtatatcaacgaaaaaaa

SEQ ID NO: 801 - protein, 894 aa, Homo Sapiens
MAWRCPRMGRVPLAWCLALCGWACMAPRGTQAEESPFVGNPGNITGARGLTGTLRCQLQVQGEPPEVHWLRDGQILELADSTQTQVPLGEDEQDDWIVVSQLRITSLQLSDTGQYQCLVFLGHQTFVSQPGYVGLEGLPYFLEEPEDRTVAANTPFNLSCQAQGPPEPVDLLWLQDAVPLATAPGHGPQRSLHVPGLNKTSSFSCEAHNAKGVTTSRTATITVLPQQPRNLHLVSRQPTELEVAWTPGLSGIYPLTHCTLQAVLSDDGMGIQAGEPDPPEEPLTSQASVPPHQLRLGSLHPHTPYHIRVACTSSQGPSSWTHWLPVETPEGVPLGPPENISATRNGSQAFVHWQEPRAPLQGTLLGYRLAYQGQDTPEVLMDIGLRQEVTLELQGDGSVSNLTVCVAAYTAAGDGPWSLPVPLEAWRPGQAQPVHQLVKEPSTPAFSWPWWYVLLGAVVAAACVLILALFLVHRRKKETRYGEVFEPTVERGELVVRYRVRKSYSRRTTEATLNSLGISEELKEKLRDVMVDRHKVALGKTLGEGEFGAVMEGQLNQDDSILKVAVKTMKIAICTRSELEDFLSEAVCMKEFDHPNVMRLIGVCFQGSERESFPAPVVILPFMKHGDLHSFLLYSRLGDQPVYLPTQMLVKFMADIASGMEYLSTKRFIHRDLAARNCMLNENMSVCVADFGLSKKIYNGDYYRQGRIAKMPVKWIAIESLADRVYTSKSDVWSFGVTMWEIATRGQTPYPGVENSEIYDYLRQGNRLKQPADCLDGLYALMSRCWELNPQDRPSFTELREDLENTLKALPPAQEPDEILYVNMDEGGGYPEPPGAAGGADPPTQPDPKDSCSCLTAAEVHPAGRYVLCPSTTPSPAQPADRGSPAAPGQEDGA

SEQ ID NO: 802 - DNA, 6091 bp, Homo Sapiens
gctcgcgcgcccaacggaccaggctggggccgtgaggtaactgttgcagccagcggaggtgggaggcgacactgagtctccagtcccgagaggtgcccgagggaaaaggaggcggcagctaaactggtcctggagagaagccccttccgcccctctcctcagccagcatgtcccggactccgccgctcctcagtccgcgcggtggggaccccgggccgtggcggccggcgcagccctgacgggttgcgaaccagggggcgccccgaacgcgggggttggggtctgggagcgcgagcggccgctacggtacgagcggggtgtgctgagtcccgtggccacccccggccccagccatgaggagggacgagcgagacgccaaagccatgcggtccctgcagccgccggatggggccggctcgccccccgagagtctgaggaacggctacgtgaagagctgcgtgagccccttgcggcaggaccctccgcgcggcttcttcttccacctctgccgcttctgcaacgtggagctgcggccgccgccggcctctccccagcagccgcggcgctgctcccccttctgccgggcgcgcctctcgctgggcgccctggctgcctttgtcctcgccctgctgctgggcgcggaacccgagagctgggctgccggggccgcctggctgcggacgctgctgagcgtgtgttcgcacagcttgagccccctcttcagcatcgcctgtgccttcttcttcctcacctgcttcctcacccggaccaagcggggacccggcccgggccggagctgcggctcctggtggctgctggcgctgcccgcctgctgttacctgggggacttcttggtgtggcagtggtggtcttggccttggggggatggcgacgcagggtccgcggccccgcacacgcccccggaggcggcagcgggcaggttgctgctggtgctgagctgcgtagggctgctgctgacgctcgcgcacccgctgcggctccggcactgcgttctggtgctgctcctggccagcttcgtctggtgggtctccttcaccagcctcgggtcgctgccctccgccctcaggccgctgctctccggcctggtggggggcgctggctgcctgctggccctggggttggatcacttctttcaaatcagggaagcgcctcttcatcctcgactgtccagtgccgccgaagaaaaagtgcctgtgatccgaccccggaggaggtccagctgcgtgtcgttaggagaaactgcagccagttactatggcagttgcaaaatattcaggagaccgtcgttgccttgtatttccagagaacagatgattctttgggattgggacttaaaacaatggtataagcctcattatcaaaattctggaggtggaaatggagttgatctttcagtgctaaatgaggctcgcaatatggtgtcagatcttctgactgatccaagccttccaccacaagtcatttcctctctacggagtattagtagcttaatgggtgctttctcaggttcctgtaggccaaagattaatcctctcacaccatttcctggattttacccctgttctgaaatagaggacccagctgagaaaggggatagaaaacttaacaagggactaaataggaatagtttgccaactccacagctgaggagaagctcaggaacttcaggattgctacctgttgaacagtcttcaaggtgggatcgtaataatggcaaaagacctcaccaagaatttggcatttcaagtcaaggatgctatctaaatgggccttttaattcaaatctactgactatcccgaagcaaaggtcatcttctgtatcactgactcaccatgtaggtctcagaagagctggtgttttgtccagtctgagtcctgtgaattcttccaaccatggaccagtgtctactggctctctaactaatcgatcacccatagaatttcctgatactgctgattttcttaataagccaagcgttatcttgcagagatctctgggcaatgcacctaatactccagatttttatcagcaacttagaaattctgatagcaatctgtgtaacagctgtggacatcaaatgctgaaatatgtttcaacatctgaatcagatggtacagattgctgcagtggaaaatcaggtgaagaagaaaacattttctcgaaagaatcattcaaacttatggaaactcaacaagaagaggaaacagagaagaaagacagcagaaaattatttcaggaaggtgataagtggctaacagaagaggcacagagtgaacagcaaacaaatattgaacaggaagtatcactggacctgattttagtagaagagtatgactcattaatagaaaagatgagcaactggaattttccaatttttgaacttgtagaaaagatgggagagaaatcaggaaggattctcagtcaggttatgtataccttatttcaagacactggtttattggaaatatttaaaattcccactcaacaatttatgaactattttcgtgcattagaaaatggctatcgagacattccttatcacaatcgtatacatgccacagatgtgctacatgcagtttggtatctgacaacacggccagttcctggcttacagcagatccacaatggttgtggaacaggaaatgaaacagattctgatggtagaattaaccatgggcgaattgcttatatttcttcgaagagctgctctaatcctgatgagagttatggctgcctgtcttcaaacattcctgcattagaattgatggctctatacgtggcagctgccatgcatgattatgatcacccagggaggacaaatgcatttctagtggctacaaatgcccctcaggcagttttatacaatgacagatctgttctggaaaatcatcatgctgcgtcagcttggaatctatatctttctcgcccagaatacaacttccttcttcatcttgatcatgtggaattcaagcgctttcgttttttagtcattgaagcaatccttgctacggatcttaaaaagcattttgattttctcgcagaattcaatgccaaggcaaatgatgtaaatagtaatggcatagaatggagtaatgaaaatgatcgcctcttggtatgccaggtgtgcatcaaactggcagatataaatggcccagcaaaagttcgagacttgcatttgaaatggacagaaggcattgtcaatgaattttatgagcagggagatgaagaagcaaatcttggtctgcccatcagtccattcatggatcgttcttctcctcaactagcaaaactccaagaatcttttatcacccacatagtgggtcccctgtgtaactcctatgatgctgctggtttgctaccaggtcagtggttagaagcagaagaggataatgatactgaaagtggtgatgatgaagacggtgaagaattagatacagaagatgaagaaatggaaaacaatctaaatccaaaaccaccaagaaggaaaagcagacggcgaatattttgtcagctaatgcaccacctcactgaaaaccacaagatatggaaggaaatcgtagaggaagaagaaaaatgtaaagctgatgggaataaactgcaggtggagaattcctccttacctcaagcagatgagattcaggtaattgaagaggcagatgaagaggaatagcgacagtttgagtaaaagaaaagtcatattgaagaagcccagagggttgtgcccaggggcagaaatcattgcctagtgttcaccggctgactctcaactgaccattcccatgtggacaggccttaatactgtgagaggatccttgctctgctggcagtttcccactcctatgcactttcacaggaactagaaaactattcttaaaccaaaaataccatccgtgttgacccatgttgcagagcccttacttaaatccttcactggtgtatgaatactttgtcataatgctgctttgctgggtagtgagctcttatttttcactgggggtcagctataactaaaaactcaagtgacatatttcagttaccaaagtggccaggaactttttgcttttatgaaaatagattcatattgtatttcccagtgtgtcttttatgtctttgaatgttttggagaaaagtctatgcctgtctaaaaatgaatccagtgttgcctttctgagggatttctgctcaatgcaatacactgttcagtgctattctcccagctaggtttatccatgaaggactgagtgacctttgttgtatttaacaaaatccaggtgcatcaatttctgatgctttttactattgtgtattatctactatgtgtgttttatttctgctgagagtattcaggtttgccatggacatcagaagtttgaattccagtcttatcttatgttccatggctgaattttaaagctgtttaggtttaacaatgaagggatttattctttagtcaaaattgttgtttttactctagctcaggattcgtatttttaaagatttagttaatatgaacacagcacagatttgttagaagaaaaaaaatttgctgtaataccaaaactaacctcatcaaagatacagaaaaaaagaaatatagtgagccctaaaggacacatacattgaataaataattggaacatgtggttatctttagatccacatcttagctgtcatttgttcactctaaaactgatgttcatctttctgttaatttccctctgcctaaagactacatgacagaaatgacctatcactacttattatttctgaagcctaactgcaagactgatttctgagaacaagtaaagaactggaatacttatttttcatataaaaatctaaatgtgttaataaatcatttcatacaaaagtacattattaaataaccacattattaaaataattgcaagaaaatggaccatatttacaatgttttgtaaacttgctagtgtgtggatatgtaccctacttgtgaaatacatttgaagatataaagagcagccaaaatgatggcaaaatggtaggctaatattttctattattattggagaacatatcatattttggaatcatgcaattttgcacacagtgaaaccattaattttccaaggtaattcctttagaatatggtattggcatgcagtttcttacttatctagaatatttggcttatctgaaagatatcaatttaagatctctggaagtgttagaatttttgatccttcacagtgtcaatatttaatgaatcactaagctttatttattagacgtgttgagtgagtgctgagttccttgctgccacttttgttaccattgtcacacactatgtgtaaaccagtcccaccacttattactaataaaattttgactgataatttatatttgcacttacaatatatatatcctgtccttatatttctctagagtacattttccatcatgtttaagtgtatttctgctattatttcctctcctgcagaatacatacaagtgtatgtgtataaagtcatacatgtacaagcatgcatattgagattgaatcacatttccatactgtctgttattttattgggttttatattgggtttctttagtttatgttgttttctcaaaagcagcattttaaattacgaatactggacttattggatttaattataaatccaattactactggaaactcatttttacataatatagtccttaaattatttaacccttgctaagtaattgacatatgtaacaataactagcctaaagaaacccaaaaaagtatctctcccgagctgaaacttaaaaattcgtaagtgtaagaaagaatgtgagaatatattaaatgcacactgtaccattagatgaaatcttacttgagaaattgccataagccatattacagatcttactttgttactgaatcagattaatttcttgttataataattttcatcataaattttctatttttaaagccgctggtactagaaatattcttttaatgctatatctatgtacctactgacacatttttctccataaaagtacttttaaaaattacttcatgatttgaaa

SEQ ID NO: 803 - protein, 1112 aa, Homo Sapiens
MRRDERDAKAMRSLQPPDGAGSPPESLRNGYVKSCVSPLRQDPPRGFFFHLCRFCNVELRPPPASPQQPRRCSPFCRARLSLGALAAFVLALLLGAEPESWAAGAAWLRTLLSVCSHSLSPLFSIACAFFFLTCFLTRTKRGPGPGRSCGSWWLLALPACCYLGDFLVWQWWSWPWGDGDAGSAAPHTPPEAAAGRLLLVLSCVGLLLTLAHPLRLRHCVLVLLLASFVWWVSFTSLGSLPSALRPLLSGLVGGAGCLLALGLDHFFQIREAPLHPRLSSAAEEKVPVIRPRRRSSCVSLGETAASYYGSCKIFRRPSLPCISREQMILWDWDLKQWYKPHYQNSGGGNGVDLSVLNEARNMVSDLLTDPSLPPQVISSLRSISSLMGAFSGSCRPKINPLTPFPGFYPCSEIEDPAEKGDRKLNKGLNRNSLPTPQLRRSSGTSGLLPVEQSSRWDRNNGKRPHQEFGISSQGCYLNGPFNSNLLTIPKQRSSSVSLTHHVGLRRAGVLSSLSPVNSSNHGPVSTGSLTNRSPIEFPDTADFLNKPSVILQRSLGNAPNTPDFYQQLRNSDSNLCNSCGHQMLKYVSTSESDGTDCCSGKSGEEENIFSKESFKLMETQQEEETEKKDSRKLFQEGDKWLTEEAQSEQQTNIEQEVSLDLILVEEYDSLIEKMSNWNFPIFELVEKMGEKSGRILSQVMYTLFQDTGLLEIFKIPTQQFMNYFRALENGYRDIPYHNRIHATDVLHAVWYLTTRPVPGLQQIHNGCGTGNETDSDGRINHGRIAYISSKSCSNPDESYGCLSSNIPALELMALYVAAAMHDYDHPGRTNAFLVATNAPQAVLYNDRSVLENHHAASAWNLYLSRPEYNFLLHLDHVEFKRFRFLVIEAILATDLKKHFDFLAEFNAKANDVNSNGIEWSNENDRLLVCQVCIKLADINGPAKVRDLHLKWTEGIVNEFYEQGDEEANLGLPISPFMDRSSPQLAKLQESFITHIVGPLCNSYDAAGLLPGQWLEAEEDNDTESGDDEDGEELDTEDEEMENNLNPKPPRRKSRRRIFCQLMHHLTENHKIWKEIVEEEEKCKADGNKLQVENSSLPQADEIQVIEEADEEE

SEQ ID NO: 804 - DNA, 2625 bp, Homo Sapiens
acgcctcgtctcctcccgtgtccctcttcccatggagtcagtacggatcgaacagatgctgagcttgcccgctgaggtcagcagcgacaacttggagtcggcggagcgaggggcatcagcggcccaagtagacatgggcccccacccaaaggtggctgcagagggccccgcacctctaccgacgcgggagccagagcaagagcagtctccggggacctcaacgccggagagcaaagtcctgctcacgcaggcagacgccttggcgtcccgggggcgaatccgtgaagccctcgaggtgtatagacagctctccgagcggcagcagctggtggctgagcagctggagcagctggtgcgctgcctggcggagaaagtcccgcaaggcgaggcgctggcgccggcgcccccggacgagggtagcactgcaagcggcaccgtggcggcggaagagacgggggccgccgcggctgcggcggccaccgaggtgtgggacggctttaagtgccggaaatgtcatgggtttctatcagaccccgtgtccttgtcgtgtggccacaccttttgtaaactgtgcctggaacgtgggcgggccgccgaccggcgctgtgcgctgtgcggggtcaagctctccgccttgatggtggccactgggcgggcgcgtggagcccggcgggctgggcagcagccgccgccgccgctgcgagtcaacgtggtgctcagcggcctcctcggcaagttgtttccaggcccagcgcgagcgtcgcaactccggcacgagggcaaccgactgtaccgcgagcgccaggtggaggcggcactgctcaagtacaacgaggcagttaagttggctccaaatgaccacttgctttatagcaatcggtctcagatttatttcaccttggagtctcatgagaatgcactgcatgatgcagaaatagcatgtaagctccgcccgatgggttttaaggcacatttcagaaaagcccaagccttagccaccctaggcaaggtggaggaggcactaagggagtttctctactgtgtatcccttgatggaaagaacaagagagcaagatgtgaagcccaaagagacaatctggagctcccacattgttctagtcaggaggaagcagcagccaggggagatggcagcagtctgatggacccagctaaagtgaagggggatggtcagcagcaccacatgaaagaccaggaagaagaggaggagaagtgggatgctacctctccaaaagctgcttccagcaagactggaaaatgccaggaaaagaaaaggaaacattgccagattgaatcccaagaagaaacggggatgcctaataaagcctccaagcaagatcctcccactgatcagggggacaaacctgctctcagtttaccacttgcatctttcgacgcatctgaccttgaatgcgctctatgtatgagattattctatgagccagtcacaacaccttgcgggcatactttttgcttaaaatgcctagaaagatgcctagatcacaacgcaaagtgtccattgtgcaaagacggtctttcacagtgcttggcatcaagaaaatacagcaaaaatgtaataatggaggagctcatagctaaattccttccagaagaactgaaggaacgaaggaagctttatgaagaggaaatggaagaactttctaaccttaataagaatgtgcctattttcgtgtgtactatggcctatcccaccgttccttgtcccctgcacatctttgagccttgttaccgcctgatgattcgtagatgcattgagacaggcacgagacagtttggcatgtgccttggagatcctgtcaaagggtttgcagaatatggctgcatcctagagatcagaaatgttcaattctttgctgatggccgctcagtggttgacagcataggcaagaggcgcttcagggtgctccatcagagccagcgggatggctacaacacagccgacattgaatacattgaagaccaaaaggttcagggagaggattgtgctgagctcatgggattacataactgtgtctatcagcaagcatcattgtggtttcattcgctcaaattatccctaaagaatcggatactcaatcactttggtcccatgccggagaaagacgccgatcctcagatgaacccgaatggcccagcctggtgctggtggatgttagcagttcttcccttggaaagccgagctcagctccccttcctagcaatgaggtccttaaaggacagactgaatggtattcgacgagtcctggccttcatatcccgaaaccaaaactagtgagtggattgccgaagaggagctcccaccttccccactgccgtcggggggagtcttcttgtaaatatatctaattgcaataatatcttaacagaagggggtgtcaaacagaggcatcagcctgctgttgatcacagagagaaattgagtagaaagaccaaaagaatgtgacctatttgaaactttctgtcttaagatgcttcttgacatgctgcataactacataaacagcagaggtgtttaagagcccagaaaaacataatttgattttaacattaaaatttccaaaagtttaaaaaaaaaaaaaaaaaaaa

SEQ ID NO: 805 - protein, 759 aa, Homo Sapiens
MESVRIEQMLSLPAEVSSDNLESAERGASAAQVDMGPHPKVAAEGPAPLPTREPEQEQSPGTSTPESKVLLTQADALASRGRIREALEVYRQLSERQQLVAEQLEQLVRCLAEKVPQGEALAPAPPDEGSTASGTVAAEETGAAAAAAATEVWDGFKCRKCHGFLSDPVSLSCGHTFCKLCLERGRAADRRCALCGVKLSALMVATGRARGARRAGQQPPPPLRVNVVLSGLLGKLFPGPARASQLRHEGNRLYRERQVEAALLKYNEAVKLAPNDHLLYSNRSQIYFTLESHENALHDAEIACKLRPMGFKAHFRKAQALATLGKVEEALREFLYCVSLDGKNKRARCEAQRDNLELPHCSSQEEAAARGDGSSLMDPAKVKGDGQQHHMKDQEEEEEKWDATSPKAASSKTGKCQEKKRKHCQIESQEETGMPNKASKQDPPTDQGDKPALSLPLASFDASDLECALCMRLFYEPVTTPCGHTFCLKCLERCLDHNAKCPLCKDGLSQCLASRKYSKNVIMEELIAKFLPEELKERRKLYEEEMEELSNLNKNVPIFVCTMAYPTVPCPLHIFEPCYRLMIRRCIETGTRQFGMCLGDPVKGFAEYGCILEIRNVQFFADGRSVVDSIGKRRFRVLHQSQRDGYNTADIEYIEDQKVQGEDCAELMGLHNCVYQQASLWFHSLKLSLKNRILNHFGPMPEKDADPQMNPNGPAWCWWMLAVLPLESRAQLPFLAMRSLKDRLNGIRRVLAFISRNQN

SEQ ID NO: 806 - DNA, 3265 bp, Homo Sapiens
cgagggcgaggcggccacgcggggccgggaatgcccgcggtgcggggccccagagccgcccggtggtcgtgtccgggcgatggctcttcgcctggtcgccgacttcgacctcgggaaggacgtgctcccgtggttgcgggcgcagcgggcagtgtcggaggccagcggggccggaagcggcggcgcagatgttttagaaaacgattatgagagcttacatgtattaaatgttgaaagaaatggaaatattatttatacctataaggatgataagggaaatgtcgtctttggattatatgattgtcaaaccagacaaaatgagcttctatatacctttgagaaagacttgcaagttttcagttgctctgtcaacagtgaaaggactttgcttgctgcaagtttagttcagtctactaaagaaggaaaaaggaacgaacttcaaccaggatcaaagtgcttgactttgttggttgaaatccaccctgttaacaatgtgaaggttctaaaggctgtggatagctatatttgggttcagtttctctacccacatattgaaagtcatcctcttccagagaaccatctgttactgatttcagaagagaaatatattgaacaatttcgtatccatgtcgcccaagaagatggaaatagagtggtgattaaaaattctggccatctcccaagagacagaatagctgaggatttcgtttgggctcagtgggatatgtcagaacagagattatattacattgacctgaagaaatcaaggagtatcttaaaatgtatccagttttatgctgatgagagctataacttaatgtttgaagtacccttggacatatcattaagcaactcaggatttaaacttgtcaactttggatgtgattatcatcaataccgagataaattttccaaacacctgactctgtgtgtttttaccaaccatacaggaagtttgtgtgtatgttacagcccgaagtgtgcctcttggggacaaatcacatattcagtgttttacattcataaaggacacagcaagaccttcaccacttctcttgagaatgttgggtcacacatgacaaagggcattacttttctcaaccttgactattatgtggctgtttacttacctggtcatttcttccacctacttaatgttcaacatccagacctgatctgccacaatctctttctgacaggaaataatgaaatgattgatatgctacctcattgccctttacagtcattgtcagggtccctggtattggattgttgttctggaaagctctatagagcactgctcagccagtcgtctttattacagcttctgcagaacacttgcttagactgtgagaagatggctgcgttgcactgcgcgctctactgcggtcaaggtgcgcagttcctggaagcccagattattcagtggatttctgagaatgtctctgcctgccattcatttgacctcattcaggaatttataattgcttcttcatactggagtgtatattcagagacaagtaacatggacaaactattgccacattcctcagtgctcacttggaatacagaaattcctggaataactcttgtgacagaagacattgcattgcctcttatgaaggtgctcagctttaagggctactgggaaaaactgaactccaacctagaatatgttaagtacgccaagccacacttccactataacaacagtgtggtcaggagagagtggcacaacctgatctctgaagagaaaacaggaaaaagaaggtctgcggcatacgtgaggaatattcttgataatgcagtaaaggtgatttctaacctagaagcaagaaatttggggccaagattaacacccctcctgcaggaggaagacagccaccagcggctgctcatggggctgatggtgtctgagctaaaagaccattttttgagacacctacagggtgtagaaaagaagaaaattgaacagatggttctggactacatttcaaaactgctggatctcatttgccacatcgtagaaaccaattggaggaaacataatcttcattcctgggttctccacttcaatagtcgtggcagtgctgctgaatttgcagtttttcacatcatgaccaggattctggaagctacaaacagtttgtttttacctctgcctcctggttttcatactctgcacaccatcctcggggtccagtgtctccctttgcataacctgctgcattgcattgacagtggagtgttgcttctcactgaaacagctgtcataaggctcatgaaagatctggataatacagagaaaaatgaaaaactgaaattcagtatcattgtgcggcttcctccgcttattgggcagaagatttgtagactttgggatcatcctatgagttctaacatcatttcgcggaaccacgtgacgcgactgcttcagaactataagaaacagcctcggaattctatgattaacaagtcatcgttcagtgtagaatttctgcctctgaactacttcattgaaattctgacagatatagagtcctccaatcaagccctgtatccttttgaaggacatgacaatgtggatgcagaatttgtagaggaagcagctctgaaacacaccgcgatgcttttaggcttatgaaaaagaaaacgcaattggatctgctgctgccattttaatcttgctcattaaccttactcctttgagaattctttaacaatatttaaaattggtaacaaaaatagtttagccataattgtttagccatgtgagtttcaggttggtacacgttcagacagaactgctgtatcacattccaattttgaatagccagtgagcaatcaagtgtagagaaatgataaatggcctaagaaggcatacagtggcataaacgatgctcttcctagtagcttaataggccacaagctagtttctgttgcactctgaaataaaatatgctttaaaaatgtagggaacagtgcttagaaaagcaaaaactaggtgtgtcattgaaataataggcataaaaattaaatgttacataagaacactatttggaaagagggtccttttaaaaactgaatttgtactaaatcagatttgccatgtccagtacagaataatttgtacttagtatttgcagcagggtttgtctttgtgaattcagatgaaacatatttatttttttttatttataaaaggttgatttaggaatattttgtcagtcattaaaaaacctgaaaacataaaaaaaaaaaaaaa

SEQ ID NO: 807 - protein, 854 aa, Homo Sapiens
MALRLVADFDLGKDVLPWLRAQRAVSEASGAGSGGADVLENDYESLHVLNVERNGNIIYTYKDDKGNVVFGLYDCQTRQNELLYTFEKDLQVFSCSVNSERTLLAASLVQSTKEGKRNELQPGSKCLTLLVEIHPVNNVKVLKAVDSYIWVQFLYPHIESHPLPENHLLLISEEKYIEQFRIHVAQEDGNRVVIKNSGHLPRDRIAEDFVWAQWDMSEQRLYYIDLKKSRSILKCIQFYADESYNLMFEVPLDISLSNSGFKLVNFGCDYHQYRDKFSKHLTLCVFTNHTGSLCVCYSPKCASWGQITYSVFYIHKGHSKTFTTSLENVGSHMTKGITFLNLDYYVAVYLPGHFFHLLNVQHPDLICHNLFLTGNNEMIDMLPHCPLQSLSGSLVLDCCSGKLYRALLSQSSLLQLLQNTCLDCEKMAALHCALYCGQGAQFLEAQIIQWISENVSACHSFDLIQEFIIASSYWSVYSETSNMDKLLPHSSVLTWNTEIPGITLVTEDIALPLMKVLSFKGYWEKLNSNLEYVKYAKPHFHYNNSVVRREWHNLISEEKTGKRRSAAYVRNILDNAVKVISNLEARNLGPRLTPLLQEEDSHQRLLMGLMVSELKDHFLRHLQGVEKKKIEQMVLDYISKLLDLICHIVETNWRKHNLHSWVLHFNSRGSAAEFAVFHIMTRILEATNSLFLPLPPGFHTLHTILGVQCLPLHNLLHCIDSGVLLLTETAVIRLMKDLDNTEKNEKLKFSIIVRLPPLIGQKICRLWDHPMSSNIISRNHVTRLLQNYKKQPRNSMINKSSFSVEFLPLNYFIEILTDIESSNQALYPFEGHDNVDAEFVEEAALKHTAMLLGL

SEQ ID NO: 808 - DNA, 3796 bp, Homo Sapiens
ctggtctggccggcgacgcgcgtgccctgtggccaaacactgcctggagtgagagcaaactaccagcgcagtggggccggcgcgagtgtgcgtgtgtgtgcgtgtgtgtgtgcgagcgcggtggaggggggggaccaactgcttcacactttcaacactgcactgaagagggagagcgagagagagactggagacgcacagatccccccaaggtctcccaagcctaccgtcccacagattattgtacagagccccaaaaatcgaaacagaggaaacgaacagcagttgaacatggacgaaggaattcctcatttgcaagagagacagttactggaacatagagattttataggactggactattcctctttgtatatgtgtaaacccaaaaggagcatgaaacgagacgacaccaaggatacctacaaattaccgcacagattaatagaaaagaaaagaagagaccgaattaatgaatgcattgctcagctgaaagatttactgcctgaacatctgaaattgacaactctgggacatctggagaaagctgtagtcttggaattaactttgaaacacttaaaagctttaaccgccttaaccgagcaacagcatcagaagataattgctttacagaatggggagcgatctctgaaatcgcccattcagtccgacttggatgcgttccactcgggatttcaaacatgcgccaaagaagtcttgcaatacctctcccggtttgagagctggacacccagggagccgcggtgtgtccagctgatcaaccacttgcacgccgtggccacccagttcttgcccaccccgcagctgttgactcaacaggtccctctgagcaaaggcaccggcgctccctcggccgccgggtccgcggccgccccctgcctggagcgcgcggggcagaagctggagcccctcgcctactgcgtgcccgtcatccagcggactcagcccagcgccgagctcgccgccgagaacgacacggacaccgacagcggctacggcggcgaagccgaggcccggccggaccgcgagaaaggcaaaggcgcgggggcgagccgcgtcaccatcaagcaggagcctcccggggaggactcgccggcgcccaagaggatgaagctggattcccgcggcggcggcagcggcggcggcccggggggcggcgcggcggcggcggcagccgcgcttctggggcccgaccctgccgccgcggccgcgctgctgagacccgacgccgccctgctcagctcgctggtggcgttcggcggaggcggaggcgcgcccttcccgcagcccgcggccgccgcggcccccttctgcctgcccttctgcttcctctcgccttctgcagctgccgcctacgtgcagcccttcctggacaagagcggcctggagaagtatctgtacccggcggcggctgccgccccgttcccgctgctataccccggcatccccgccccggcggcagccgcggcagccgccgccgccgctgccgccgccgccgccgcgttcccctgcctgtcctcggtgttgtcgccccctcccgagaaggcgggcgccgccgccgcgaccctcctgccgcacgaggtggcgccccttggggcgccgcacccccagcacccgcacggccgcacccacctgcccttcgccgggccccgcgagccggggaacccggagagctctgctcaggaagatccctcgcagccaggaaaggaagctccctgaatccttgcgtcccgaaggacggaggttcaagcagagtgagaagttaaaatacccttaaggaggttcaagcagagtgagaagttaaaatacccttaaggtctttaagggaggaagtgtaatagatgcacgacaggcataaacaagaacaacaaaacaggtgttatgtgtacattcggagttcctgttttgctcatcccgcaccaccccaccctccacacactaacatccctttcttccccccaccagctgtaaaagatcctatgcgaaagacactggctcttttttttaatcccccaaataaattttgcccccttttaggccatgttccattatctcttaaaattggaacctaattcgagaggaagtaagaagggtctgttctgtggctgagctaggtgaaccccggggtaggggaaagatgttaacacctttgacgtctttggagttgacatggaacagcaggtagttgttatgtagagctagttctcaaagctgccctgcctgttttaggaggcgttccacaaacagattgaggctcttttagaattgaatttactcttcagtattttctaatgttcagctttctaaaaggcatatatttttcaaagaagtgaggatgcagtttctcacgttgcaacctattctgaagtggtttaaatggtatctcttagtaacttgcactcgttaaagaaacacggagctgggccatcgtcagaactaagtcagggaaggagatggatgagaaggccagaatcattcctagtacatttgctaacactttattgagaaattgaccatgaattaatggactcatcttaatttcttctaagtccatatatagatagatatctatctgtacagatttctatttatccatagataggtatctatacatacacatctcaagtgcatctattcccactctcattaatccatcatgttcctaaatttttgtaatcttactgtaaaaaaaagtgcactgaacttcaaaacaaaacaaaaaacaacaacaacaaaaaacaagtccaaactgatatatcctatattctgttaaaattcaaaagtgaacgaaagcatttaactggccagttttgattgcaaatgctgtaaagatatagaatgaagtcctgtgaggccttcctatctccaagtctatgtattttctggagaccaaaccagataccagataatcacaaagaaagcttttttaataaggcttaaaccaagaccttgtctagatatttttagtttgttgccaaggtagcactgtgagaaatctcacttggatgttatgtaaggggtgagacacaacagtctgactatgagtgaggaaaatatctgggtcttttcgtcagtttggtgcatttgctgctgctgttgctactgtttgcctcaaacgctgtgtttaaacaacgttaaactcttagcctacaaggtggctcttatgtacatagttgttaatacatccaattaatgatgtctgacatgctatttttgtagggagaaaatatgtgctaatgatattttgagttaaaatatcttttggggaggatttgctgaaaagttgcacttttgttacaatgcttatgcttggtacaagcttatgctgtcttaaattattttaaaaaaataaatactgtctgtgagaaaccagctggtttagaaaagtttagtatgtgacgataaactagaaattacctttatattctagtattttcagcactccataaattctattacctaaatattgccacactattttgtgatttaaaaattcttactaaggaataaaaactttaatatacgatatgatattgtctaataattaaaaaagacataatggatgctcaattagttttaagatatctataactatagggatacaaatcactacagttctcagatttacagcttttttttgtcattggcttgatgtcacacatttccaatctcttgcaagcctccaggctctggctttgtctacctgctcgttcccaatgtatcttaatgaaaagtgcaaaagaaaaacctaccaattaaaaaaaaaaaaaaaaaa

SEQ ID NO: 809 - protein, 482 aa, Homo Sapiens
MDEGIPHLQERQLLEHRDFIGLDYSSLYMCKPKRSMKRDDTKDTYKLPHRLIEKKRRDRINECIAQLKDLLPEHLKLTTLGHLEKAVVLELTLKHLKALTALTEQQHQKIIALQNGERSLKSPIQSDLDAFHSGFQTCAKEVLQYLSRFESWTPREPRCVQLINHLHAVATQFLPTPQLLTQQVPLSKGTGAPSAAGSAAAPCLERAGQKLEPLAYCVPVIQRTQPSAELAAENDTDTDSGYGGEAEARPDREKGKGAGASRVTIKQEPPGEDSPAPKRMKLDSRGGGSGGGPGGGAAAAAAALLGPDPAAAAALLRPDAALLSSLVAFGGGGGAPFPQPAAAAAPFCLPFCFLSPSAAAAYVQPFLDKSGLEKYLYPAAAAAPFPLLYPGIPAPAAAAAAAAAAAAAAAAFPCLSSVLSPPPEKAGAAAATLLPHEVAPLGAPHPQHPHGRTHLPFAGPREPGNPESSAQEDPSQPGKEAP

SEQ ID NO: 810 - DNA, 11650 bp, Homo Sapiens
atggtggccctgtccttaaagatttgtgtgcgccactgcaacgtggtgaagaccatgcagtttgaaccatctacagctgtgtacgatgcgtgtcgagtcattcgggaacgggtgcctgaggcacaaactgggcaagcttctgactatggactctttctttcggatgaagacccgaggaaagggatttggctggaagcgggcagaacactggattactacatgttgcggaatggggatattttggaatataaaaagaaacagagacctcagaaaatccggatgctggatggatctgtgaagacagtgatggtggatgattccaagactgtgggggagctcctggtcactatttgtagcagaataggaataacaaattatgaagaatactccttaatccaagaaactattgaagaaaagaaagaggaaggaacgggcacactcaaaaaagacaggacactgttacgagatgagaggaaaatggagaagttgaaggccaagctgcacacagatgatgacctaaattggctggatcacagccgaacattcagagaacaaggagtagatgaaaacgaaacgttgctgcttagacggaagttcttttactctgatcagaatgtagattcgagagaccccgtgcagctgaacttgctttatgttcaggcacgggatgacatcctgaatggctctcaccctgtctccttcgagaaagcttgtgagtttggtggatttcaagcccagatacaatttggacctcatgtggaacataaacacaaacctggatttttagatctgaaggaattcctgcccaaagaatatatcaagcagagaggagctgaaaagaggatctttcaggagcataagaactgcggagagatgagtgagatagaagccaaggtcaagtacgtcaaactcgcacggtccctccgcacatatggcgtgtccttcttcctggtgaaggagaagatgaaaggcaagaacaagctggtgcctcgcctgctggggatcaccaaagactcggtgatgcgcgtggatgagaagaccaaggaagtgctgcaggagtggcccctcaccaccgtcaagcgctgggcagcctcacccaagagcttcacactggattttggggagtatcaggaaagctactattcagtacaaaccaccgagggagagcagatatcccagctgattgcaggctacattgacatcatcctgaaaaagaaacaaagtaaagatcgatttggactagaaggtgatgaggagtcaaccatgttagaagagtccgtttccccaaaaaagtccaccatcttgcagcagcagttcaaccggaccgggaaggcagagcacggctcagtggcgctgccggccgtgatgcgctcgggctccagcgggcctgagaccttcaacgttggcagcatgccctcgccacagcagcaggtcatggttgggcagatgcaccgaggccacatgccgccactgacctcagcccagcaggccctgatggggaccatcaacacaagcatgcacgccgtccagcaggcccaggatgatctcagtgagctcgactcgctgccacctctcggccaggatatggcatctagggtatgggttcagaacaaagtcgacgaatccaaacacgaaatccattctcaagttgatgctatcacggccggaacggcttcagttgttaacctcacagctggtgaccctgcagacactgactacacagctgtgggatgtgcgatcaccactatttcttccaacctgacggagatgtccaagggtgtgaagctattggccgccctcatggatgatgaggtgggcagcggggaggacttgctcagagctgccaggaccctcgctggggcggtgtcagacttgctgaaagctgtgcagcctacttctggagagcctcgacagacagttttgactgctgctggcagcatcggacaagccagtggggatcttctgagacagattggagagaatgagactgatgagcgattccaggatgttttaatgagtttggccaaagctgttgccaatgcagctgccatgttggtactaaaggcaaagaatgttgcccaagtggccgaagacactgtcctacagaacagggtaattgctgctgccacccagtgtgccctctccacctcccagcttgtggcatgtgccaaggttgtgagccccactattagctcccctgtgtgccaggagcagctgattgaagcagggaagctggtggaccgctcggtggagaactgtgtccgtgcctgccaggcggccactaccgatagtgagctcctgaagcaggtcagcgcagcggccagcgtggtcagccaggccctccatgatctcctgcagcatgtgcggcagtttgccagccgaggcgagcccatcggccgctacgaccaggctactgacaccatcatgtgtgtcaccgagagcatcttcagctccatgggtgacgctggtgaaatggtgcgccaggcgcgggttctggcccaagccacatcagacctcgtcaatgccatgaggtcagatgcagaagccgaaatcgacatggagaattcaaagaagctcctggcagcagcaaaactcttagctgactccactgctcgcatggtggaagctgcaaagggggctgcagccaacccagagaatgaggaccagcagcaaaggctgagagaagctgcagaaggcctccgggtagcaaccaacgcagctgcccagaatgctattaagaaaaaaattgtcaaccgactggaggttgcagccaagcaggccgcagcggcagccacacagaccatcgccgcctcccagaatgcagctgtttccaacaagaaccctgcggcccagcagcagctggtccagagttgcaaggcagtggctgatcacatccctcagctggtccagggagtgagggggagccaagctcaagctgaagacctgagtgcccagctggctctcatcatctccagccagaacttcctccagcctggaagcaagatggtgtcctctgccaaagccgcagtgcccaccgtgagtgaccaggccgcagccatgcagctgagccagtgtgccaagaacctggccaccagcttggcggagctgcgtaccgcctcgcagaaggcccatgaagcttgtggtccgatggaaatcgattcagctctgaatacggtgcagacgcttaagaatgaactgcaggatgccaagatggcagccgtggagagccagctgaagccacttccaggggaaacgctggaaaaatgtgctcaggacctgggaagcacatccaaggcggtgggctcctccatggcacagctgctgacctgtgctgctcaaggcaacgaacactacacaggggtggctgctagagagacggcccaagctctgaaaacactggcccaggccgcccgtggagtggctgcatcgacaaccgaccccgcggccgcccatgccatgttagattctgctcgagacgtgatggagggctccgccatgctcattcaagaggccaagcaggccctgattgcacctggagatgcagagcgtcaacaaagactggctcaggtggctaaagccgtctcacactccttgaataactgcgtaaattgcctccctgggcagaaggatgtggacgtggccttgaagagcatcggggagtccagcaagaagctgcttgtggattcgctacctccaagcacgaagcctttccaggaagcccagagtgaactgaaccaggcagcagctgatctgaaccagtctgctggggaagtggtccatgccacccggggccagagtggagagttggctgcagcctctggaaagttcagtgatgattttgatgaattcctcgatgctggcattgagatggctggccaagctcagacaaaagaagaccagatccaagtgatagggaacctcaagaatatctcgatggcatccagcaagctgctgttagctgccaagtctctctctgtagatccaggagctcccaatgcgaaaaatctcctggctgcagctgcaagagctgtgacagagagcatcaatcaactcatcactctgtgtacccaacaagctccgggccagaaagagtgcgataatgccctgcgggagctcgagactgtgaaggggatgttggacaatcctaatgaacctgttagtgacctctcttactttgactgcattgagagtgtgatggaaaactccaaggttctgggtgaatcgatggcagggatttcacagaatgccaagaccggagacctccctgcctttggggaatgtgtggggattgcatccaaggctctctgtgggctgacagaggctgcagcccaggctgcatacttggttggcatctctgatccaaacagccaggcaggccaccagggcctggtggaccccatccagtttgccagggctaaccaggccatccagatggcatgccagaacttggtggaccctggcagcagcccatcacaggtcctgtcagccgccacaattgttgccaagcacacgtcagccttgtgcaatgcctgccgcatcgcctcatccaagacggccaacccagtagccaagaggcacttcgtccagtcagccaaggaagtcgccaacagcactgccaacctggtgaagaccatcaaggccctggatggggatttctctgaagacaaccgcaataagtgtcgcatcgccaccgcacccttgattgaagctgtggagaacctgacagcgttcgcctcaaaccctgagtttgtcagcattcctgcccagatcagctccgagggttcccaggcacaggaaccaatcctggtctcagccaagaccatgctggagagttcatcgtacctcattcgcactgcacgctctctggccatcaaccccaaagacccacccacctggtctgtactggctggacattcccatacagtgtccgactccatcaagagtctcatcacttctatcagggacaaggcccctggacagagggagtgtgattactccatcgatggcatcaaccggtgcatccgggacatcgagcaggcctcgctggccgccgtcagccagagcctggccacgagggacgacatctctgtggaggccctgcaggagcagctgacttcggtggtccaggaaatcggacaccttatcgatcccatcgccacagcggctcggggagaagcagctcagctgggacataaggtgacacaactggcaagctattttgagcccttgatcttagccgcagttggtgtggcctccaagattcttgatcatcagcagcagatgacggtgctggaccagaccaagactctcgcagagtctgccttgcagatgttgtatgcagccaaagaaggtggcggaaaccccaaggcacaacacacccatgacgccatcacagaggccgcccagttgatgaaggaagccgtggatgacatcatggtgacgctgaacgaagctgccagtgaagtggggctggttgggggcatggtggacgccattgcagaagccatgagcaagctggatgaaggcactcctccagaaccaaagggaacatttgtcgactatcagacgactgtggttaaatactccaaagccattgcggtgacagctcaggaaatgatgactaagtcggttactaacccggaggagttgggaggactggcttcacaaatgaccagtgactatgggcacctggctttccagggccagatggcagcagccacggcggaaccagaggagatcggattccagattcgcactcgtgtgcaggacctgggccacggctgtatcttcctggtgcagaaggcaggggccctccaggtctgccccacagacagctacaccaagagggagctgatcgaatgcgcccgtgccgtcacggaaaaggtctccttggtgctctcggctctccaggccgggaacaaaggaacccaggcatgcattacagccgccaccgctgtgtctgggatcattgccgacctggacaccaccattatgtttgcaacagcggggacgctgaatgcagagaacagtgagaccttcgcagaccacagggagaacattctcaagacggccaaggccttggtagaagacacgaaactacttgtgtcaggagctgcgtccactcctgacaagctggcccaggcggcccagtcctcagcagccaccatcacccagctcgcagaagtggtcaagctgggggcagccagcctgggctccgacgaccccgagacccaggtggttttgatcaatgccatcaaagatgtggccaaggccctttctgatctcatcagtgctaccaagggagctgccagcaagccagtggacgacccttccatgtaccagctcaagggggctgccaaggtgatggtgaccaatgtcacctcgctcctcaagactgtaaaggcagtggaggatgaggccacccggggcaccagggcgcttgaggccacaattgaatgcataaagcaggagcttacggtgttccagtcaaaagacgtacctgaaaagacatcatcacctgaagaatccataaggatgacgaaaggcatcaccatggcaacagccaaagccgtggcagctgggaactcatgtagacaggaggacgtgattgctactgccaacctgagccggaaagccgtgtcagatatgttgacggcttgcaagcaagcatccttccaccccgatgtcagtgacgaggtgagaaccagagccttgcgtttcgggacggagtgcacccttggctacttggacctcctggagcacgtcttggtgattcttcagaaaccaaccccagaattcaagcagcagctggccgctttctccaagcgagtcgccggcgctgtgacagagctcatccaggcggcggaagccatgaaaggaacagagtgggtggatccagaagacccaactgtcattgcagaaacagagttactgggggctgcagcatccatcgaagctgctgctaagaagttagagcaactgaagccaagagcaaaaccaaaacaagcggatgagaccctggactttgaggaacagatcttggaagctgctaaatccattgctgctgccacaagcgccctggtcaaatcggcctcagcagcccagagggagctggtggcccaaggaaaggtgggctccatccctgccaatgctgcagacgacggacagtggtcacaggggctgatttctgctgcccggatggtggcggctgcgaccagcagtctctgtgaggcggccaatgcctccgttcagggacacgccagcgaggagaagctcatctcatctgccaagcaggtcgccgcttccacggctcagctgctggtggcctgcaaggtgaaggccgaccaggattcagaggccatgaggcggctacaggcggcaggaaatgctgtgaaaagagcctcagacaatcttgtccgtgcagcccagaaggcagcttttggcaaagctgatgacgacgatgttgtagtgaaaaccaagtttgtggggggcattgctcagatcatcgccgcccaggaagaaatgctaaagaaagagcgagaactggaagaagcaaggaaaaaactggcccaaatccgccagcagcagtataagtttttacccaccgagctgagggaagatgagggctaaaggtgcgagcccagatggcgagccccaggggatggccctggctgaactggacagacagtgttcctgagaggctgggcacttagctggaaaccgcccacctccctcccgggtgagcctggagccctgcgtgcttgttctcacatctctgtcccgtcggcactggctgcatgatcgtgatgtcacacggtacaatgtcctacccacaactcctctgccgcctcccctcatgcctcaccgtgtctcaggagagaggggtgcacgtttcatggactgttaccaacaaagaaaagtcagtattatgttgttctcagacactttggcttttgttggtccttctcttaggcctgctcctggacctctttatgatattgtgatagggaaaaaaatcattgacgtcatagaatattcttcttcctctcaggagaagacggaagctggagttggacatggttcataaaagccagaaacacaaacccgtgtggactccgggagggtgactcaggtcctccttccatgtcttgagcactggctcacccagggggtgaaaaattcccgcccctgtttgcacgctttcttgcctccgtgtgtaagctccttgtacaacccagacccatcttgtattttgtggcccagaaaactgaacgattattttgttcctccgtagtccaaagggcagagttgcggaaggccgtcggggcttggtgagcaggggctgtaatacagtctgtgggctccttaccctgcagaggctgtttcagctcacacagagtcatccacacaaacccacggctcccagttgacagtcagtggaatgctcgtctccttagcgtccagggtggggattctgctggaataaagagcttcctcagtgactcatctttaggtcccacgctggtttctgtgccttcagaatggtcacaagcccggattggaaaggatctgcttacaaacctgtcccctgtcctccaacccaaaacgcctttttttctgtcttaatatccagaaaatctaaatgcatcctaaaatcaatgtgaacctttaacaagatagttttacttattatcacataagacataagatgttttcattttctggatgtcacacttccagaatttcatatttttcccctcttttctttccccttttcagagccctcccataggaagggaagggcttgaatttacccttaatctgcacctttagccaaggcagtgcatggaagatgaatggctcgtgggacagaatctaatgccagggagcaggagtgtttgaaagaattcatagtggggaaggtaaaagttaatggaagtacatgattttcaaaactggtaacagttaaaggcactcaccctccgcctctctctctctctctctctctggtgtgctatcatgtcttggactccatccacactatagtttcaaagttccactgacgggggaaagttggtgctttggtcctccgaagatgtcacctttcgaccttgcccgatcttgtttcaccagactctagcccatgtcatggttttaaaatacataaacttctgacagcttcccatatttataagttacttataagtgctgcacgtattagaatttttttttttcagaccagtaaagttagagaaaagacgctgtaaaggaaaagcaagtgagagtatgtgtaggacactgacagtgtgtgggcaccagttctgaagaggaggggagctgctggagccctagcctgttggggaaaagctggcacactcttggctcgccctctttgagtggagctgatccaacacctcatgcctgccttggccggacactgagaggaggggcacacgtgcttccagagacactcaggagtcagaccccaatgctcagagtcacaatgtgttcatggcctcctgtaacaggactctggggatcccctctgtggcccagcccaccccaccctctgctcttctatgctgtgcccagggcagctgccctcttctgcctgtgccccatcccatcctgaaaacccaggaccaaggcaggggcaggcagccagttcttccaccttgcctcagagtcatttaaaacctttactgcatttgataccagaaaagcctccagagacaaaccaaatgcaaaggcctttcctttataactctaaagaacaggcatcgaaagtttatttttgtaggagctatataaatactcacctttctggagtcgtccagtgctgggagctttggggagtttggttctcagttatcacctggtatggtcccagtttctcatctgtcctttcctcatccaccctgcacatgtgtatgtgaacggcttcgtggccggtgtggtggtttctcatttcataagatagttgaagggccatgccttgtctggatgttatttaataggcactactgcggtgtcctcagatggtactgagggggccttctggtccttcaaaggaaaataacacaggcatgagttcatttgggagtgtgaactttcagaacacctaataagagagtggtgtcagagtaaaaacggccccaggtctggagcatagaagtgtatctctgtgaagagagagccggtgtgttgacatgtggttcttctcacacccctctactcctcgagggctttgaatccttgggctgatttttgtgccagaaattgctgttcccgatggccaaaaggggaacctgaactggatttcagaactgcccagtgatttgaaaatttagattttacttgggcctttcaggagtctttagatagggatgctgaggtcatatttagttcaatgaacagcccttgtttaagttttgccagtgtccagccagctgtggccctggccatctgtgcaggcaggttcctcaattcctggttggccctgcagtcggtcaacacagtccctccaggtcggctgcagaggcagctgcccagcctgcagtctatgcacgggccttaagaaatgagctgcctgtagcctcacggcatatgcttttatcagggaaaacccttcgagcttcttctgattctcacctgcttgctttctggctgtcttagtcagtgtgtttacaggcaactaaagcctgttcctaatttatcaaaaaattataaccaaaattcaccatagcctaagagagtaaaccccacctccaaagtgatgccaaggccaaaacctcatcaaggaaccagacacaggtcaaaagtggtgagcaagccatggtctctgctcctggggaactcacacgctgacccccgaggagccttggtttcctccctggcagatagtccccagaatcttctctcccagctttgaggttctgggctctggaaaggcctctgggatgctggccttaagatctcagcacagactatcagcatgttccattctcagattcctggaggaaaggtaccctctgttgaccaaggggctggctgcttctgagacttaccaacccaagaaatttggagacattcccctcaggctaaaaggcagcggtccccagagttcagaaagcaaaagatcttgacaactgtgccagtagtggctctggtcctatctctccacagtgctggcctctgctggggaaggcatctttcccaaaggtatccccaagtaccatgttgaaaatgtcctcagtctgttgctccatctttctgagcctctgcttggtatgtcatgtttatggtcactacggatgagtgtgtgcagagtttgggttgattcttttaaatgctacaaacaagagctatttcttttcaataaaaaaggtttggattcggcctcttcctctgagcccacctcccagccctccagggagcatcagtgtacctgagtcactttgtctgcatctcttcatcccacaaaacacgaggctgggtctcattcagcggcctctcaccaaccttcaagatccagaagaaaacaggaacgttcagctctgccctgtgtcgtatctaatcacatacattaatttatctaaccacataagttatttttttttatttgccagaaataaacctttaaaggaacaaa

SEQ ID NO: 811 - protein, 2542 aa, Homo Sapiens
MVALSLKICVRHCNVVKTMQFEPSTAVYDACRVIRERVPEAQTGQASDYGLFLSDEDPRKGIWLEAGRTLDYYMLRNGDILEYKKKQRPQKIRMLDGSVKTVMVDDSKTVGELLVTICSRIGITNYEEYSLIQETIEEKKEEGTGTLKKDRTLLRDERKMEKLKAKLHTDDDLNWLDHSRTFREQGVDENETLLLRRKFFYSDQNVDSRDPVQLNLLYVQARDDILNGSHPVSFEKACEFGGFQAQIQFGPHVEHKHKPGFLDLKEFLPKEYIKQRGAEKRIFQEHKNCGEMSEIEAKVKYVKLARSLRTYGVSFFLVKEKMKGKNKLVPRLLGITKDSVMRVDEKTKEVLQEWPLTTVKRWAASPKSFTLDFGEYQESYYSVQTTEGEQISQLIAGYIDIILKKKQSKDRFGLEGDEESTMLEESVSPKKSTILQQQFNRTGKAEHGSVALPAVMRSGSSGPETFNVGSMPSPQQQVMVGQMHRGHMPPLTSAQQALMGTINTSMHAVQQAQDDLSELDSLPPLGQDMASRVWVQNKVDESKHEIHSQVDAITAGTASVVNLTAGDPADTDYTAVGCAITTISSNLTEMSKGVKLLAALMDDEVGSGEDLLRAARTLAGAVSDLLKAVQPTSGEPRQTVLTAAGSIGQASGDLLRQIGENETDERFQDVLMSLAKAVANAAAMLVLKAKNVAQVAEDTVLQNRVIAAATQCALSTSQLVACAKVVSPTISSPVCQEQLIEAGKLVDRSVENCVRACQAATTDSELLKQVSAAASVVSQALHDLLQHVRQFASRGEPIGRYDQATDTIMCVTESIFSSMGDAGEMVRQARVLAQATSDLVNAMRSDAEAEIDMENSKKLLAAAKLLADSTARMVEAAKGAAANPENEDQQQRLREAAEGLRVATNAAAQNAIKKKIVNRLEVAAKQAAAAATQTIAASQNAAVSNKNPAAQQQLVQSCKAVADHIPQLVQGVRGSQAQAEDLSAQLALIISSQNFLQPGSKMVSSAKAAVPTVSDQAAAMQLSQCAKNLATSLAELRTASQKAHEACGPMEIDSALNTVQTLKNELQDAKMAAVESQLKPLPGETLEKCAQDLGSTSKAVGSSMAQLLTCAAQGNEHYTGVAARETAQALKTLAQAARGVAASTTDPAAAHAMLDSARDVMEGSAMLIQEAKQALIAPGDAERQQRLAQVAKAVSHSLNNCVNCLPGQKDVDVALKSIGESSKKLLVDSLPPSTKPFQEAQSELNQAAADLNQSAGEVVHATRGQSGELAAASGKFSDDFDEFLDAGIEMAGQAQTKEDQIQVIGNLKNISMASSKLLLAAKSLSVDPGAPNAKNLLAAAARAVTESINQLITLCTQQAPGQKECDNALRELETVKGMLDNPNEPVSDLSYFDCIESVMENSKVLGESMAGISQNAKTGDLPAFGECVGIASKALCGLTEAAAQAAYLVGISDPNSQAGHQGLVDPIQFARANQAIQMACQNLVDPGSSPSQVLSAATIVAKHTSALCNACRIASSKTANPVAKRHFVQSAKEVANSTANLVKTIKALDGDFSEDNRNKCRIATAPLIEAVENLTAFASNPEFVSIPAQISSEGSQAQEPILVSAKTMLESSSYLIRTARSLAINPKDPPTWSVLAGHSHTVSDSIKSLITSIRDKAPGQRECDYSIDGINRCIRDIEQASLAAVSQSLATRDDISVEALQEQLTSVVQEIGHLIDPIATAARGEAAQLGHKVTQLASYFEPLILAAVGVASKILDHQQQMTVLDQTKTLAESALQMLYAAKEGGGNPKAQHTHDAITEAAQLMKEAVDDIMVTLNEAASEVGLVGGMVDAIAEAMSKLDEGTPPEPKGTFVDYQTTVVKYSKAIAVTAQEMMTKSVTNPEELGGLASQMTSDYGHLAFQGQMAAATAEPEEIGFQIRTRVQDLGHGCIFLVQKAGALQVCPTDSYTKRELIECARAVTEKVSLVLSALQAGNKGTQACITAATAVSGIIADLDTTIMFATAGTLNAENSETFADHRENILKTAKALVEDTKLLVSGAASTPDKLAQAAQSSAATITQLAEVVKLGAASLGSDDPETQVVLINAIKDVAKALSDLISATKGAASKPVDDPSMYQLKGAAKVMVTNVTSLLKTVKAVEDEATRGTRALEATIECIKQELTVFQSKDVPEKTSSPEESIRMTKGITMATAKAVAAGNSCRQEDVIATANLSRKAVSDMLTACKQASFHPDVSDEVRTRALRFGTECTLGYLDLLEHVLVILQKPTPEFKQQLAAFSKRVAGAVTELIQAAEAMKGTEWVDPEDPTVIAETELLGAAASIEAAAKKLEQLKPRAKPKQADETLDFEEQILEAAKSIAAATSALVKSASAAQRELVAQGKVGSIPANAADDGQWSQGLISAARMVAAATSSLCEAANASVQGHASEEKLISSAKQVAASTAQLLVACKVKADQDSEAMRRLQAAGNAVKRASDNLVRAAQKAAFGKADDDDVVVKTKFVGGIAQIIAAQEEMLKKERELEEARKKLAQIRQQQYKFLPTELREDEG

SEQ ID NO: 812 - DNA, 2230 bp, Homo Sapiens
gtcacatgaccggctttaagcaacatggcggctgccgtggtgcagcgcccgggctgagcgacagcaagtgcagcgggctcctaccccgggtgaggggtggcctccgcgtgggatcgtgccctcttcagcccgctcctgtccccgacatcacgtgtattccgcacgtcccctccgcgctgtgtgtctactgagacggggaggcgtgacagggcccgggtcccttctcagtggtgctctgtgcttcagggcaagctccccgtctccgggcgcacttccctcgcctgtgttcggtccatcctcctttctccagcctcctcccctcgcaggtgggatcgtcggtgggaccggagcgcgggcgggcgcggccccccgggaccatggccgggtccgacaccgcgcccttcctcagccaggcggatgacccggacgacgggccagtgcctggcaccccggggttgccagggtccacggggaacccgaagtccgaggagcccgaggtcccggaccaggaggggctgcagcgcatcaccggcctgtctcccggccgttcggctctcatagtggcggtgctgtgctacatcaatctcctgaactacatggaccgcttcaccgtggctggcgtccttcccgacatcgagcagttcttcaacatcggggacagtagctctgggctcatccagaccgtgttcatctccagttacatggtgttggcacctgtgtttggctacctgggtgacaggtacaatcggaagtatctcatgtgcgggggcattgccttctggtccctggtgacactggggtcatccttcatccccggagagcatttctggctgctcctcctgacccggggcctggtgggggtcggggaggccagttattccaccatcgcgcccactctcattgccgacctctttgtggccgaccagcggagccggatgctcagcatcttctactttgccattccggtgggcagtggtctgggctacattgcaggctccaaagtgaaggatatggctggagactggcactgggctctgagggtgacaccgggtctaggagtggtggccgttctgctgctgttcctggtagtgcgggagccgccaaggggagccgtggagcgccactcagatttgccacccctgaaccccacctcgtggtgggcagatctgagggctctggcaagaaatcctagtttcgtcctgtcttccctgggcttcactgctgtggcctttgtcacgggctccctggctctgtgggctccggcattcctgctgcgttcccgcgtggtccttggggagaccccaccctgccttcccggagactcctgctcttcctctgacagtctcatctttggactcatcacctgcctgaccggagtcctgggtgtgggcctgggtgtggagatcagccgccggctccgccactccaacccccgggctgatcccctggtctgtgccactggcctcctgggctctgcacccttcctcttcctgtcccttgcctgcgcccgtggtagcatcgtggccacttatattttcatcttcattggagagaccctcctgtccatgaactgggccatcgtggccgacattctgctgtacgtggtgatccctacccgacgctccaccgccgaggccttccagatcgtgctgtcccacctgctgggtgatgctgggagcccctacctcattggcctgatctctgaccgcctgcgccggaactggcccccctccttcttgtccgagttccgggctctgcagttctcgctcatgctctgcgcgtttgttggggcactgggcggcgcagccttcctgggcaccgccatcttcattgaggccgaccgccggcgggcacagctgcacgtgcagggcctgctgcacgaagcagggtccacagacgaccggattgtggtgccccagcggggccgctccacccgcgtgcccgtggccagtgtgctcatctgagaggctgccgctcacctacctgcacatctgccacagctggccctgggcccaccccacgaagggcctgggcctaaccccttggcctggcccagcttccagagggaccctgggccgtgtgccagctcccagacactacctgggtagctcaggggaggaggtgggggtccaggagggggatccctctccacaggggcagccccaagggctcggtgctatttgtaacggaataaaatttgtagccagaccccaaaaaaaaaaaaaaaaaa

SEQ ID NO: 813 - protein, 528 aa, Homo Sapiens
MAGSDTAPFLSQADDPDDGPVPGTPGLPGSTGNPKSEEPEVPDQEGLQRITGLSPGRSALIVAVLCYINLLNYMDRFTVAGVLPDIEQFFNIGDSSSGLIQTVFISSYMVLAPVFGYLGDRYNRKYLMCGGIAFWSLVTLGSSFIPGEHFWLLLLTRGLVGVGEASYSTIAPTLIADLFVADQRSRMLSIFYFAIPVGSGLGYIAGSKVKDMAGDWHWALRVTPGLGVVAVLLLFLVVREPPRGAVERHSDLPPLNPTSWWADLRALARNPSFVLSSLGFTAVAFVTGSLALWAPAFLLRSRVVLGETPPCLPGDSCSSSDSLIFGLITCLTGVLGVGLGVEISRRLRHSNPRADPLVCATGLLGSAPFLFLSLACARGSIVATYIFIFIGETLLSMNWAIVADILLYVVIPTRRSTAEAFQIVLSHLLGDAGSPYLIGLISDRLRRNWPPSFLSEFRALQFSLMLCAFVGALGGAAFLGTAIFIEADRRRAQLHVQGLLHEAGSTDDRIVVPQRGRSTRVPVASVLI

SEQ ID NO: 814 - DNA, 3507 bp, Homo Sapiens
gaagccagacagctggctcgagcctctcctgctcagcaccatggctaagacccctagtgaccatctgctgtccaccctggaggagctggtgccctatgacttcgagaagttcaagttcaagctgcagaacaccagtgtgcagaaggagcactccaggatcccccggagccagatccagagagccaggccggtgaagatggccactctgctggtcacctactatggggaagagtacgccgtgcagctcaccctgcaggtcctgcgggccatcaaccagcgcctgctggccgaggagctccacagggcagccattcaggaatattccacacaagaaaacggcacagatgattccgcagcgtccagctccctgggggagaacaagcccaggagcctgaagactccagaccaccccgaggggaacgaggggaacggccctcggccgtacgggggcggagctgccagcctgcggtgcagccagcccgaggccgggagggggctgtcgaggaagcccctgagcaaacgcagagagaaggcctcggagggcctggacgcgcagggcaagcctcggacccggagcccggccctgccgggcgggagaagccccggcccctgcagggcgctagaggggggccaggccgaggtccggctgcgcagaaacgccagctccgcggggaggctgcaggggctggcggggggcgccccggggcagaaggagtgcaggcccttcgaagtgtacctgccctcgggaaagatgcgacctagaagccttgaggtcaccatttctacaggggagaaggcgcccgcaaatccagaaattctcctgactctagaggaaaagacagctgcgaatctggactcggcaacagaaccccgggcaaggcccactccggatggaggggcatctgcggacctgaaggaaggccctggaaatccagaacattcggtcaccggaaggccaccagacacggctgcgagtccccgctgccacgcccaggaaggagacccagttgacggtacctgtgtgcgtgattcctgcagcttccccgaggcagtttctgggcacccccaggcctcaggcagccgctcacctggctgcccccggtgccaggactcccatgaaaggaagagcccgggaagcctaagcccccagcccctgccacagtgtaagcgccacctgaagcaggtccagctgctcttctgtgaggatcacgatgagcccatctgcctcatctgcagtctgagtcaggagcaccaaggccaccgggtgcgccccattgaggaggtcgccctggaacacaagaagaaaattcagaagcagctggagcatctgaagaagctgagaaaatcaggggaggagcagcgatcctatggggaggagaaggcagtgagctttctgaaacaaactgaagcgctgaagcagcgggtgcagaggaagctggagcaggtgtactacttcctggagcagcaagagcatttctttgtggcctcactggaggacgtgggccagatggttgggcagatcaggaaggcatatgacacccgcgtatcccaggacatcgccctgctcgatgcgctgattggggaactggaggccaaggagtgccagtcagaatgggaacttctgcaggacattggagacatcttgcacagggctaagacagtgcctgtccctgaaaagtggaccactcctcaagagataaaacaaaagatccaactcctccaccagaagtcagagtttgtggagaagagcacaaagtacttctcagaaaccctgcgttcagaaatggaaatgttcaatgttccagagctgattggcgctcaggcacatgctgttaatgtgattctggatgcagaaaccgcttaccccaacctcatcttctctgatgatctgaagagtgttagacttggaaacaagtgggagaggctgcctgatggcccgcaaagatttgacagctgtatcattgttctgggctctccgagtttcctctctggccgccgttactgggaggtggaggttggagacaagacagcatggatcctgggagcctgcaagacatccataagcaggaaagggaacatgactctgtcgccagagaatggctactgggtggtgataatgatgaaggaaaatgagtaccaggcgtccagcgttcccccgacccgcctgctaataaaggagcctcccaagcgtgtgggcatcttcgtggactacagagttggaagcatctccttttacaatgtgacagccagatcccacatctatacattcgccagctgctctttctctgggccccttcaacctatcttcagccctgggacacgtgatggagggaagaacacagctcctctgactatctgtccagtgggtggtcaggggcctgactgaatgcccaacactgcatctctcttcctgcttctggccttgtatcttgcattcacactcaatagtcacggaatgccgactaggtgctagctgctatgggaaatgcaaaaataacaaaatagttactgtgcccacggagcctacccgattatagcagaggtaagttaggaacgaacatgttagtcaatccgggtgaagacatgtactgatgacacaccatggatttcagaggaggaagtacggagtcgttgcataatccgcccctggtgggtggcactctcaggtgctcctgaacagaagatttggccctcattttccctcagaaccccacggcaaggatatatgtccccttgttctctctgcttctgtcttgaggatatgggaagcctagagaaacgcaagcagactggattgggatagaagtatttgtgtacctggattaatgaactatgattttttttttttttttttgagaccaaatcttgctctgtggcccaggctggagtgcagtggcacgatctcagctcactgcaacctccacctcccaggttcaagcgattctcctgcctcagcctcctgagcagctgggattacaggtgcgtgccaccacaccaggctggttttcttgtatttttagtagagacgggggtttcaccatgttagccaggctggtctcgaactcctgacctcaggtgatccacccgcctcagcctcccaaagtgctgggattacaggcatgagccactgtgcccggcctatgattcttttttttttttttttttgagacaaagttttgctcttgtcacccaggctggagtgcagtggtgcaatcttggctcgcaacctccgcctcccaggttcaagagattctcctgcctcagcctccgaagtagctgggattacaggcgcccgccaccatgcccggctaattttttgcatttttagtagacatgaggtttcatcatgttggccaggccggtctcaaactcctgacctcaggtgatgcacccacctcagcctcccaaagtgcagggattacaggcatgagccaccatgccgggccatgattcttaagagaattgactgggcctcatgaataaaaaaattagaaaatctaaaaaaaa

SEQ ID NO: 815 - protein, 781 aa, Homo Sapiens
MAKTPSDHLLSTLEELVPYDFEKFKFKLQNTSVQKEHSRIPRSQIQRARPVKMATLLVTYYGEEYAVQLTLQVLRAINQRLLAEELHRAAIQEYSTQENGTDDSAASSSLGENKPRSLKTPDHPEGNEGNGPRPYGGGAASLRCSQPEAGRGLSRKPLSKRREKASEGLDAQGKPRTRSPALPGGRSPGPCRALEGGQAEVRLRRNASSAGRLQGLAGGAPGQKECRPFEVYLPSGKMRPRSLEVTISTGEKAPANPEILLTLEEKTAANLDSATEPRARPTPDGGASADLKEGPGNPEHSVTGRPPDTAASPRCHAQEGDPVDGTCVRDSCSFPEAVSGHPQASGSRSPGCPRCQDSHERKSPGSLSPQPLPQCKRHLKQVQLLFCEDHDEPICLICSLSQEHQGHRVRPIEEVALEHKKKIQKQLEHLKKLRKSGEEQRSYGEEKAVSFLKQTEALKQRVQRKLEQVYYFLEQQEHFFVASLEDVGQMVGQIRKAYDTRVSQDIALLDALIGELEAKECQSEWELLQDIGDILHRAKTVPVPEKWTTPQEIKQKIQLLHQKSEFVEKSTKYFSETLRSEMEMFNVPELIGAQAHAVNVILDAETAYPNLIFSDDLKSVRLGNKWERLPDGPQRFDSCIIVLGSPSFLSGRRYWEVEVGDKTAWILGACKTSISRKGNMTLSPENGYWVVIMMKENEYQASSVPPTRLLIKEPPKRVGIFVDYRVGSISFYNVTARSHIYTFASCSFSGPLQPIFSPGTRDGGKNTAPLTICPVGGQGPD

SEQ ID NO: 816 - DNA, 2603 bp, Homo Sapiens
agggggcggggaggcggggggaggcggggagcccggccgccagcgctcgggtccgcctctgactgcagcgcggcggggcgatgtgtgattaccatggcgaggagtctctgtccgggggcctggctaaggaaaccctattacctccaggctcgcttctcatatgtgcggatgaaatatcttttcttttcctggttagtggtttttgttggaagctggattatatatgtgcagtattctacctatacagaattatgcagaggaaaggactgtaagaaaataatatgtgacaagtacaagactggagttattgatgggcctgcatgtaacagcctttgtgttacagaaactctttactttggaaaatgtttatccaccaagcccaacaatcagatgtatttagggatttgggataatctaccaggtgttgtgaaatgtcaaatggaacaagcgcttcatcttgattttggaactgaattggaaccaagaaaagaaatagtgctatttgataagccaactagaggaactactgtacaaaaatttaaagaaatggtctatagtctctttaaggcaaaattgggtgaccaaggaaacctctctgaactggttaatctcatcttgacggtggctgatggagacaaagatggccaggtttccttgggagaagcaaagtcggcatgggcacttcttcaactgaatgaatttcttctcatggtgatacttcaagataaagaacatacccccaaattaatgggattctgtggtgacctctatgtgatggaaagtgttgaatatacctctctttatggaataagccttccttgggtcattgaactttttattccatctgggttcagaagaagcatggatcagctgttcacaccatcatggccaagaaaggccaaaatagccataggacttctagaatttgtggaagatgttttccatggcccctacggaaatttcctcatgtgcgatactagtgccaaaaacctaggatataatgataagtatgatttgaaaatggtggatatgagaaaaattgtgccagagacaaacctgaaagaacttattaaggatcgtcactgtgagtctgatttggactgtgtctatggcacagattgtagaactagctgtgatcagagtacaatgaagtgtacttcagaagtgatacaaccaaacttggcaaaagcttgtcagttactcaaagactacctactgcgtggtgctccaagtgaaattcgtgaagaattagaaaagcagctttattcttgtattgctctcaaagtcacagcaaatcaaatggaaatggaacattctttgatactaaataacctaaaaacattattgtggaagaaaatttcctacactaatgactcttagttcatttggacataattaccattttaagaaacctgccacttttaaagaacaattttgagcattaaaaaaaaatggcttcaaattccggccagttacacaaaactccttccccccaggcctgagaagccatcagtatgtgatcactgaagtaatggcaggtgtaggatcaacaggtccccaagatgtcattcctgcccttttagaagccctgttacatctccgaagtacattcattgtgtaactattttgactgactttaaaaaccaatgctgtgaaaagcttcattccataaacatcaacagtgagtgatttgtagatttaccttagccaaaataccaatgctggaagcattgtgtttgcattgaagctgctgttcaacaagaaaatttataaatttactaatgtcttagcatggtaaagtttgcacattaacagaaattaagactgcaaagcaggttaaacttgcttctttataaaacagatgttgggttaatagcatggtttactgtattaaagacttatacacccatttttaacctcattcagacatcaagttatgtgtagcttcacaatggttcaagtggcttacttcaagaaatcttatacttgacagtacaccaattttattgactaaaaatggatgaactttcctaaagattcaaagggcccatcttagtatcacgcagctgactgagcccttcaaaactgacatcttaaggcccaatcaagatccacatatcctgattttgaactatgtgaaagtgggactgtaagtgcaagactaaaataaattatagcagactttttagtaataactttccattttcaaacagtatatcctgtgggccaaagggctatttcttaaagaggcatgtaaatgtatttatttatctaatgtttttttccccatgtaaacttgatatacaaggtttagtatttgctcctctttcatattattttcacacgtatactcagatttggcatgtacctttcaacatctccataaaattaaacaccttttggagaaaagaaccactattttctgctcaaaggtttcgcctacctaaagtggaacatgttaaaaatctatgtgaccatcactggacagctttctctcaaaactttccttcaacgccatggattagcaccagttttgtttactttaaggtacttttcccattcatcatctggttataataaatggatggaagaaatatttccca

SEQ ID NO: 817 - protein, 428 aa, Homo Sapiens
MARSLCPGAWLRKPYYLQARFSYVRMKYLFFSWLVVFVGSWIIYVQYSTYTELCRGKDCKKIICDKYKTGVIDGPACNSLCVTETLYFGKCLSTKPNNQMYLGIWDNLPGVVKCQMEQALHLDFGTELEPRKEIVLFDKPTRGTTVQKFKEMVYSLFKAKLGDQGNLSELVNLILTVADGDKDGQVSLGEAKSAWALLQLNEFLLMVILQDKEHTPKLMGFCGDLYVMESVEYTSLYGISLPWVIELFIPSGFRRSMDQLFTPSWPRKAKIAIGLLEFVEDVFHGPYGNFLMCDTSAKNLGYNDKYDLKMVDMRKIVPETNLKELIKDRHCESDLDCVYGTDCRTSCDQSTMKCTSEVIQPNLAKACQLLKDYLLRGAPSEIREELEKQLYSCIALKVTANQMEMEHSLILNNLKTLLWKKISYTNDS

SEQ ID NO: 818 - DNA, 4109 bp, Homo Sapiens
cgggccggggcggcgcgagcggctggagcaacgggccccgcggcagctgcgggcgacgcggtcgatggacatgggcacccagggatcggggcgcaagcggctccccaaccgggagcggctcacggcggaggacgacgcgctcaaccagatcgcgcgggaggcggaagcccggctcgctgcaaaacgggcggcccgcgcggaggctcgcgagatccgcatgaaggagctggagcggcagcagaaggagatctatcaggtccaaaagaaatattatgggctggatacaaaatggggtgacatcgagcagtggatggaagacagtgagcgctactctcgtagatccagaagaaacacatcggcttctgatgaagacgagcgcatgtcagtgggtagtcgtggaagcctgaggtcgcagcctgacttggagtatgggggtccttacgcctggacaaatggttatgatggagaattgtatggatcacagtccctgaatagaagatctggcaggccctcctgtctgtacagcgctgcccggccttcggggagttaccgggcgtctgtgttggatgaaggcagcttcggtgggacccgacggggcagcacctccggctcccgtgctccctcggagtacagcggccacctcaactccagctcccgcgcctcctccagggccagctcggcccgggccagccctgtggtagaagagagaccagaaaaagattttactgagaaggggtctcgtaacatgccgggcctgtctgcagccacgctggcctctctgggtgggacttcctctcggagaggcagcggagacacctccatctccatcgacaccgaggcatccatcagggaaatcaaggaactcaatgagttaaaggaccagattcaggatgtagaaggcaaatacatgcagggattgaaagagatgaaggactctctagcagaagttgaagagaaatataagaaggctatggtttccaatgctcagctagacaatgaaaagacaaacttcatgtaccaggttgataccctaaaagatatgttgctggagcttgaagaacagctggctgaatctaggcggcagtacgaagagaaaaacaaagaatttgaaagggaaaaacacgcccacagtatactgcaatttcagtttgctgaagtcaaggaggccctgaagcaaagagaggaaatgctcgaggaaatccgacagctacagcagaaacaggcgagttctatcagggagatttctgatcttcaggaaacaatagagtggaaagacaaaaagataggggcattagagaggcagaaagagttctttgattccgtaaggagtgaacgggatgatcttagagaagaagtagtcatgctgaaagaggaattaaagaaacatggaataatcctaaattcagaaatagctaccaatggagagacttccgacaccctcaataatgttggataccaaggtcctaccaagatgacaaaagaagagttaaatgccctcaagtcgacaggggatgggaccctagatattaggttgaaaaagctggttgatgaacgggaatgcttattggaacagattaagaaactcaaagggcagctggaggagagacagaagattggcaaactagacaatcttcgatctgaagatgatgtcttggaaaacgggacagacatgcatgtaatggacctacaaagggatgccaacagacagatcagcgacctcaaatttaaacttgcaaaatctgagcaagagataactgcattagaacaaaatgtaataaggttagagagtcaagtatcacgttacaaatcagcggctgaaaatgcagaaaaaatagaagatgaacttaaggcagaaaaacggaaactccaaagagagctccgctctgcattggataaaacagaagagctcgaggtgagcaacggccacttagtgaagcgtctggaaaaaatgaaagcaaatcggagtgcactcttgtcccagcagtaaattccagctctgatcaggcaactggttggtgactggagagcattgtttcataggcttttctctgtcctatctgggagcgctgcttcttcccctgccttccgagagacgaagaccgtggcgagcttggcgcttaggggctcccgtgccatggctcaccccagggagccccagcagccaccaggtgcctctgtctgcagacccctggcccgggctggcgccgacgctcagaacctgcaggtacttcataagcacacaggggcctcgagggagctctgtgtctgaccgcacagcagcctctgaatgccgctggaagtgatgatcaaagtaaagattcagttgggacttgagttttttttttttttcatgtgtcttgctgaagattaaggggaaatgttacagtgttgggacttcctttcatggcagaatctacaatttgagcgacttcagtagtatctcttagtctacgcttttcatacacaaaacactgtggaaccacaagccattaccaagcaaaactctttcactggaaacaagggggcagtctagaagtaaaagtgaccttaagaagactctttacaggcaacaaatgaagcttttctaagggatttttgcatcagttcagtcataagaatacttttttccagggtaattaggcaatagcttcactgaaaatgacagcttttcattgcattatttaatccttatatttggaattgaagtcgttaacttcttttaaagaatgtactattagaaaaattaaaaatgaaatgttgagagacttcagcaatgtggttctaatttttttccactgagaaagaagatctttaatttcatattaatggttctgtatattttgggtcatctttttattttttaagaatatcaagtcaattcatttttctttccctatttaaaaaaaaaggtgttttcacagaatgagtgcacttaaaaagtgaagtgaaggaggaggtaacagtagagacgatggcaatatcatcaaggacaaaagtaaaaacgtttagctacctgctgatttttagtgactgttcatatatgttgtatttcaagtatggctggtgaagccagtcagcttttcgggacgttagcaagtggaaactgagtcagtatcatccaaaaccatatctagtcttaacacatggagaatgctggagtgagggttgtgagttcagggtatataatcaagaaaacactcccagcataatgctaggggtcaccagtgtccatcccccagaactgtatggatctaggatatacacagctgcgttgcattaagaaagagatgaaatctctattaaaatacacaagatttttgtatctccttgtgcagaggatatttgccactgcccattgggaagcagacaagttatagggggctgggggccaacactggcaagtaggaaaccacgggtcggacaggtgagcaaaatgtgctggcaggtgggcaccactgggagacccacactgcacacccgggcaccgtatgaacaggaaagaggaaggaagctggacgaagcccctcagggaccctgtgctgaccatgctgggcccaccggcaaaagggagatattcagttccttgtctcatccttaaggtttcttccacaacatctgaatacaagcatgtttaactgggaaaatgtctatgtcatgcgtgaataacaccagcagcaaacactcacacatcacgcagacacggccggcagcatgctgacgcttttaggtatttttcactcatgcaattttcacatattttcactcatttcatttgcacggaaattctatgaggtagatgctgttatcaaatccacattacagatgagggacccagggtccaggaaggtgaactggcagaagtctcccagctggtagaacagggctgcaaggcatcgattcccaggtgtctcacagccctgagaagatggcgttttccctatcagtggctctgaggaagtcaagccttcagtctctacctctcccaccaattcttttggaaacagcaaaccaatgttacacacacttcctaatccagaggaagctagaacacgatttttaaatttatttagtaaaataaaactttttttgcagatgtaacgaaaaaaaaa

SEQ ID NO: 819 - protein, 640 aa, Homo Sapiens
MDMGTQGSGRKRLPNRERLTAEDDALNQIAREAEARLAAKRAARAEAREIRMKELERQQKEIYQVQKKYYGLDTKWGDIEQWMEDSERYSRRSRRNTSASDEDERMSVGSRGSLRSQPDLEYGGPYAWTNGYDGELYGSQSLNRRSGRPSCLYSAARPSGSYRASVLDEGSFGGTRRGSTSGSRAPSEYSGHLNSSSRASSRASSARASPVVEERPEKDFTEKGSRNMPGLSAATLASLGGTSSRRGSGDTSISIDTEASIREIKELNELKDQIQDVEGKYMQGLKEMKDSLAEVEEKYKKAMVSNAQLDNEKTNFMYQVDTLKDMLLELEEQLAESRRQYEEKNKEFEREKHAHSILQFQFAEVKEALKQREEMLEEIRQLQQKQASSIREISDLQETIEWKDKKIGALERQKEFFDSVRSERDDLREEVVMLKEELKKHGIILNSEIATNGETSDTLNNVGYQGPTKMTKEELNALKSTGDGTLDIRLKKLVDERECLLEQIKKLKGQLEERQKIGKLDNLRSEDDVLENGTDMHVMDLQRDANRQISDLKFKLAKSEQEITALEQNVIRLESQVSRYKSAAENAEKIEDELKAEKRKLQRELRSALDKTEELEVSNGHLVKRLEKMKANRSALLSQQ

SEQ ID NO: 820 - DNA, 5235 bp, Homo Sapiens
gcggggagctcgcaccgccgcgcccgggccgcgagtgatgataacctaagaggccggcgcgggcgggcgtgagcggcggaggagccgggcgcggcgacacgcggccatggagcgggagccggcggggaccgaggagcccgggcctccgggacggcggaggcgccgagagggcaggacgcgcacggtgcgctccaacctgctgccgcccccgggcgccgaggaccctgcggctggcgcggccaagggcgagcggcgacggcggcgcgggtgtgcccagcacctggccgacaaccggctcaagactaccaagtacacgctgctgtccttcctgcccaagaacctgttcgagcagttccaccgcccggccaacgtgtactttgtcttcatcgcgctgctcaacttcgtgccggcggtgaacgccttccagcccggcctggcactggcgccggtgctcttcatcctggccatcacggccttcagggacctgtgggaggactacagccgccaccgctccgaccacaagatcaaccacctgggctgcctggtcttcagcagggaagaaaagaaatacgtgaaccgattctggaaagaaatccacgtgggagactttgtgcgtcttcgctgcaacgaaatcttccctgcggacattctgctgctctcctccagtgaccccgacgggctatgccacatcgagaccgccaacctggatggagagaccaacctgaagcggcggcaggtggtccgcggcttctcggagcttgtctccgaattcaatcctttgacgttcaccagcgtgatcgaatgcgagaagccaaacaacgacctgagtaggtttcgcggctgcatcatacatgacaacgggaaaaaggccgggctgtataaagaaaacctgctgctgaggggctgcacccttaggaacacggacgcagtcgtcggcattgtcatctacgcaggacatgaaaccaaggctctgctgaacaacagtgggccccgctacaagcgcagcaagctggagaggcagatgaactgcgacgtgctctggtgtgtcctgctccttgtttgcatgtctctgttttcagcagtcggacatggactgtggatatggcggtatcaagagaagaagtcattattttatgtccccaagtctgatggaagctccttatccccagtcacagctgcagtttactcatttttaacaatgataatagttctgcaggttttgatcccaatttccttatacgtttccattgaaattgttaaagcatgccaagtgtacttcattaaccaggacatgcagttgtatgacgaagaaacagactcgcagctgcagtgccgagctctgaacatcacggaagacttaggacagatacagtacattttctcagataaaactggcactttgacagagaataagatggttttccgaagatgcactgtgtctggtgtagaatattctcatgatgcaaatgcgcagcgtctggccaggtaccaagaggcagactcggaggaggaggaggtggtgcccagagggggctcggtgtcccagcgcggcagcatcggcagccaccagagtgtccgggtggtgcacagaacccagagcaccaagtcccaccggcgcacgggcagccgggccgaggccaagagggccagcatgctgtccaagcacacggccttcagcagccccatggagaaggatatcacgcccgacccaaagctgctggagaaggtgagtgagtgtgacaagagcctagccgtggcgaggcatcaggagcacctgctggcccacctctcgcctgagctgtctgacgtctttgatttcttcatcgcactcaccatctgcaacacagtcgtcgtcacgtccccggatcagccacgaacaaaggtgagggtgaggtttgagctgaagtccccggtgaagacgatagaagacttcctgcggaggttcacacccagctgcctgacctcaggctgcagcagcatcgggagcctggccgccaacaagtccagccacaagttgggctccagcttcccgtccaccccgtccagcgacggcatgcttctcaggctggaggagaggctgggccagcccacctcggccatcgccagcaacggctacagcagccaggcggacaactgggcctcggagcttgctcaggagcaggagtcagagcgcgagctgcggtacgaggcggagagcccggatgaggccgcactggtgtatgcggccagagcctacaactgcgtgcttgtggagcggctgcacgaccaagtgtcagtggagctgccccacctgggcaggctcaccttcgagctcctgcacacactgggtttcgattccgtccgcaagaggatgtcagtggtgatccggcacccgcttaccgatgagatcaacgtctacaccaagggggccgactcagtggtcatggatctcctgcagccctgctcttcagttgacgccagagggaggcatcaaaaaaagattcggagcaaaactcagaattacctcaacgtgtatgcggcggaaggcctgcgcaccttgtgcatcgccaagagagttctgagtaaagaagagtatgcctgctggttgcaaagccacctagaagccgaatcctccctggaaaacagcgaggagctcctcttccagtctgccattcgcctggagaccaacctgcacttgttaggtgccactgggattgaagaccgcctgcaggacggagtccctgaaactatttctaaattgcgtcaagcgggcctgcagatttgggttctcactggtgacaaacaagaaacagctgtcaacattgcatatgcctgcaaactgctggaccacgacgaggaggtcatcaccctgaatgccacctcccaggaggcgtgtgcagccctgctagaccagtgcctatgctacgtgcagtccagaggcctccagagagcccctgagaagaccaagggcaaagtgagcatgaggttctcctctctctgcccaccctccacgtccactgcctctggccgcagacccagcctcgtgatcgatgggagaagcctggcctacgctctcgagaaaaacctggaggacaaattcctcttccttgccaagcagtgccgctccgtcctctgctgtcggtcgacgcctctgcagaagagcatggtggtgaagctggtgcggagcaagctcaaggccatgaccctggccataggtgatggagccaatgatgtcagcatgatccaggtggcagatgtgggtgtgggaatctccggccaggagggtatgcaggcagtgatggccagcgactttgcagtgccgaaattccgatacctggagaggctcttgattcttcacgggcattggtgctactcccgacttgccaacatggtgctgtacttcttctacaaaaacacaatgttcgtgggcctcctgttttggttccagtttttctgtggcttctctgcatctaccatgattgaccagtggtatctaatcttctttaatctgctcttctcgtcacttcccccgctcgtgactggggtgctggacagggatgtgccagccaatgtgctgctgaccaacccgcagctctacaagagtggccagaacatggaggaataccggccacgaacgttctggtttaacatggccgacgccgccttccagagcctggtttgcttttccattccttacctggcctactatgactcgaacgtggacctgtttacctgggggacccctattgtgacaatcgcgctgctcactttcctgctccacctgggcattgaaaccaaaacctggacctggctcaactggataacgtgtggcttcagtgtccttttgtttttcaccgtggctttgatttacaatgcgtcttgtgccacgtgctatcctccgtccaacccttactggactatgcaagccttactgggtgacccagtgttttacttgacttgcctgatgacgcctgtcgctgcactgctgcccagattgtttttcagatccctccaggggagggttttccccacacaacttcagctggcacgtcagttgaccaggaagtcccccaggagatgcagtgctcccaaagagacctttgctcagggacgcctcccgaaggactcgggaaccgagcactcatcagggaggacagtcaagacctctgtgcccctgtcccagccttcttggcacacacagcagccggtctgctccctggaggccagcggggagcccagcacagtggacatgagcatgccagtgagggagcacaccctgctggaggggctgagcgcaccggcccccatgtcctctgcgccaggggaggctgtcctgaggagtccaggagggtgtcctgaggagtccaaggtgagagctgccagcaccggcagggtgacccccctgtcttccctcttcagcctgcctaccttcagcttactcaactggatttcctcctggtcgctggtcagcaggctggggagtgtcttacagttctcccggacggagcagcttgcagatggacaagcgggacgtggacttcctgtccagccccactcaggccgatcaggacttcaagggccagaccacagactacttataggagcatcttcaaggcggtcacagtgaaaaccttgaaatggccttttttaatatatataaataaatgttaatattatttatgtttattatttgcacagaagagttctagggagatgtatttctaaatgtttcccaggctaatacaggaaacaagaggtaccaaaaaagaaagtttattttttaaaattctaagtagagtatattgaaaagaaaaagaagagccttaacatatataaaagtttaaagaagagtaacacttgaaaagtgtgtttagatttattttttcatctcatttttaagaacaagcagtacgatttgttttcttcaacatgtgtgactgcgcactgagtacaaatgtgtgactgctcatggttaatgcaggcaggtgtgaacatgggggaacaatgagcagagatggcagagggcagagcacatggcccccagaggcttccagtctcactgacacaggagggctgggctccacttcatccagatgaaggaaaggaagacctcaagaaaaattcacagttgagtgcatcccagcattctgttccgggcaggcatttcaggaagaccgccttgtaggtattacatccctggtgtcgtattttgcctgttaaatcgtaacaagcaataaacaactttcactttgcaaa

SEQ ID NO: 821 - protein, 1499 aa, Homo Sapiens
MEREPAGTEEPGPPGRRRRREGRTRTVRSNLLPPPGAEDPAAGAAKGERRRRRGCAQHLADNRLKTTKYTLLSFLPKNLFEQFHRPANVYFVFIALLNFVPAVNAFQPGLALAPVLFILAITAFRDLWEDYSRHRSDHKINHLGCLVFSREEKKYVNRFWKEIHVGDFVRLRCNEIFPADILLLSSSDPDGLCHIETANLDGETNLKRRQVVRGFSELVSEFNPLTFTSVIECEKPNNDLSRFRGCIIHDNGKKAGLYKENLLLRGCTLRNTDAVVGIVIYAGHETKALLNNSGPRYKRSKLERQMNCDVLWCVLLLVCMSLFSAVGHGLWIWRYQEKKSLFYVPKSDGSSLSPVTAAVYSFLTMIIVLQVLIPISLYVSIEIVKACQVYFINQDMQLYDEETDSQLQCRALNITEDLGQIQYIFSDKTGTLTENKMVFRRCTVSGVEYSHDANAQRLARYQEADSEEEEVVPRGGSVSQRGSIGSHQSVRVVHRTQSTKSHRRTGSRAEAKRASMLSKHTAFSSPMEKDITPDPKLLEKVSECDKSLAVARHQEHLLAHLSPELSDVFDFFIALTICNTVVVTSPDQPRTKVRVRFELKSPVKTIEDFLRRFTPSCLTSGCSSIGSLAANKSSHKLGSSFPSTPSSDGMLLRLEERLGQPTSAIASNGYSSQADNWASELAQEQESERELRYEAESPDEAALVYAARAYNCVLVERLHDQVSVELPHLGRLTFELLHTLGFDSVRKRMSVVIRHPLTDEINVYTKGADSVVMDLLQPCSSVDARGRHQKKIRSKTQNYLNVYAAEGLRTLCIAKRVLSKEEYACWLQSHLEAESSLENSEELLFQSAIRLETNLHLLGATGIEDRLQDGVPETISKLRQAGLQIWVLTGDKQETAVNIAYACKLLDHDEEVITLNATSQEACAALLDQCLCYVQSRGLQRAPEKTKGKVSMRFSSLCPPSTSTASGRRPSLVIDGRSLAYALEKNLEDKFLFLAKQCRSVLCCRSTPLQKSMVVKLVRSKLKAMTLAIGDGANDVSMIQVADVGVGISGQEGMQAVMASDFAVPKFRYLERLLILHGHWCYSRLANMVLYFFYKNTMFVGLLFWFQFFCGFSASTMIDQWYLIFFNLLFSSLPPLVTGVLDRDVPANVLLTNPQLYKSGQNMEEYRPRTFWFNMADAAFQSLVCFSIPYLAYYDSNVDLFTWGTPIVTIALLTFLLHLGIETKTWTWLNWITCGFSVLLFFTVALIYNASCATCYPPSNPYWTMQALLGDPVFYLTCLMTPVAALLPRLFFRSLQGRVFPTQLQLARQLTRKSPRRCSAPKETFAQGRLPKDSGTEHSSGRTVKTSVPLSQPSWHTQQPVCSLEASGEPSTVDMSMPVREHTLLEGLSAPAPMSSAPGEAVLRSPGGCPEESKVRAASTGRVTPLSSLFSLPTFSLLNWISSWSLVSRLGSVLQFSRTEQLADGQAGRGLPVQPHSGRSGLQGPDHRLLIGASSRRSQ

SEQ ID NO: 822 - DNA, 2722 bp, Homo Sapiens
gagtctggccgcagtcgcggcagtggtggcttcccatccccaaaaggcgccctccgactccttgcgccgcactgctcgccgggccagtccggaaacgggtcgtggagctccgcaccactcccgctggttcccgaaggcagatcccttctcccgagagttgcgagaaactttcccttgtccccgacgctgcagcggctcgggtaccgtggcagccgcaggtttctgaaccccgggccacgctccccgcgcctcggcttcgcgctcgtgtagatcgttccctctctggttgcacgctggggatcccggacctcgattctgcgggcgagatgcccctgggacacatcatgaggctggacctggagaaaattgccctggagtacatcgtgccctgtctgcacgaggtgggcttctgctacctggacaacttcctgggcgaggtggtgggcgactgcgtcctggagcgcgtcaagcagctgcactgcaccggggccctgcgggacggccagctggcggggccgcgcgccggcgtctccaagcgacacctgcggggcgaccagatcacgtggatcgggggcaacgaggagggctgcgaggccatcagcttcctcctgtccctcatcgacaggctggtcctctactgcgggagccggctgggcaaatactacgtcaaggagaggtctaaggcaatggtggcttgctatccgggaaatggaacaggttatgttcgccacgtggacaaccccaacggtgatggtcgctgcatcacctgcatctactatctgaacaagaattgggatgccaagctacatggtgggatcctgcggatatttccagaggggaaatcattcatagcagatgtggagcccatttttgacagactcctgttcttctggtcagatcgtaggaacccacacgaagtgcagccctcttacgcaaccagatatgctatgactgtctggtactttgatgctgaagaaagggcagaagccaaaaagaaattcaggaatttaactaggaaaactgaatctgccctcactgaagactgaccgtgctctgaaatctgctggccttgttcattttagtaacggttcctgaattctcttaaattctttgagatccaaagatggcctcttcagtgacaacaatctccctgctacttcttgcatccttcacatccctgtcttgtgtgtggtacttcatgttttcttgccaagactgtgttgatcttcagatactctctttgccagatgaagttacttgctaactccagaaattcctgcagacatcctactcggccagcggtttacctgatagattcggtaatactatcaagagaagagcctaggagcacagcgagggaatgaaccttacttgcactttatgtatacttcctgatttgaaaggaggaggtttgaaaagaaaaaaatggaggtggtagatgccacagagaggcatcacggaagccttaacagcaggaaacagagaaatttgtgtcatctgaacaatttccagatgttcttaatccagggctgttggggtttctggagaattatcacaacctaatgacattaatacctctagaaagggctgctgtcatagtgaacaatttataagtgtcccatggggcagacactccttttttcccagtcctgcaacctggattttctgcctcagccccattttgctgaaaataatgactttctgaataaagatggcaacacaattttttctccattttcagttcttacctgggaacctaattccccagaagctaaaaaactagacattagttgttttggttgctttgttggaatggaatttaaatttaaatgaaaggaaaaatatatccctggtagttttgtgttaaccactgataactgtggaaagagctaggtctactgatatacaataaacatgtgtgcatcttgaacaatttgagaggggaggtggagttggaaatgtgggtgttcctgttttttttttttttttttttttagttttcctttttaatgagctcaccctttaacacaaaaaaagcaaggtgatgtattttaaaaaaggaagtggaaataaaaaaatctcaaagctatttgagttctcgtctgtccctagcagtctttcttcagctcacttggctctctagatccactgtggttggcagtatgaccagaatcatggaatttgctagaactgtggaagcttctactcctgcagtaagcacagatcgcactgcctcaataacttggtattgagcacgtattttgcaaaagctacttttcctagttttcagtattactttcatgttttaaaaatccctttaatttcttgcttgaaaatcccatgaacattaaagagccagaaatattttcctttgttatgtacggatatatatatatatagtcttccaagatagaagtttactttttcctcttctggttttggaaaatttccagataagacatgtcaccattaattctcaacgactgctctattttgttgtacggtaatagttatcaccttctaaattactatgtaatttattcacttattatgtttattgtcttgtatcctttctctggagtgtaagcacaatgaagacaggaattttgtatatttttaaccaatgcaacatactctcagcacctaaaatagtgccgggaacatagtaagggctcagtaaatacttgttgaataaactcagtctcctacattagcattctaa

SEQ ID NO: 823 - protein, 239 aa, Homo Sapiens
MPLGHIMRLDLEKIALEYIVPCLHEVGFCYLDNFLGEVVGDCVLERVKQLHCTGALRDGQLAGPRAGVSKRHLRGDQITWIGGNEEGCEAISFLLSLIDRLVLYCGSRLGKYYVKERSKAMVACYPGNGTGYVRHVDNPNGDGRCITCIYYLNKNWDAKLHGGILRIFPEGKSFIADVEPIFDRLLFFWSDRRNPHEVQPSYATRYAMTVWYFDAEERAEAKKKFRNLTRKTESALTED

SEQ ID NO: 824 - DNA, 3045 bp, Homo Sapiens
ctttcttcactctgaagccaagagccgaccttctgagccctcaagaaagatcagaacagattcatgggtgatttagcctatctgtcccaggccagcgtggctgagtgtgctggctggaggcctctctctctgcttcgagggtagctgagatccaccccggaaaccggcaggatgaagggggcaagtgaggagaagctggcatctgtgtccaacctggtcactgtgtttgagaatagcaggaccccagaagcagcacccagaggccagaggctagaggacgtgcatcaccgccctgagtgcaggcctcccgagtccccaggaccacgggagaagacgaatgtcggggaggccgtggggtctgagcccaggacagtcagcaggaggtacctgaactccctgaagaacaagctgtccagcgaagcctggaggaaatcttgccagcctgtgaccctctcaggatcggggacgcaggagccagagaagaagatcgtccaggagctgctggagacagagcaggcctatgtggcgcgcctccacctgctagaccaggtgtttttccaggagctgctgaagacagcccgcagcagcaaggccttcccagaggatgtggtcagggtcatcttctccaacatctcctccatctatcagttccattctcagttcttcctcccagagctgcagcggcgcctggacgactggacagctaacccccgcatcggtgacgtgatccagaagctggcccccttcctgaagatgtacagtgagtatgtcaagaactttgagcgagcggctgagctgctggccacctggaccgacaagtctccactcttccaggaggttctcactcgcatccagagcagcgaggcttcgggcagcctgaccctgcagcaccacatgctggaaccagtgcagagaattccacgttacgagctgctgctcaaggagtacatccagaagctgccagcccaggccccagaccaggccgatgcccagaaagccctggacatgatcttctcagctgcccagcactccaatgcagccatcactgagatggagcggctgcaggacctgtgggaggtgtaccagcgcctgggcctcgaggacgacatagtagacccctctaacaccctgctccgtgagggcccggtcctcaagatctccttccgccgcaacgaccccatggagcgctaccttttcttgttcaacaacatgctgctctactgtgtgcccagggtgatccaggtgggcgcccagttccaggtgaggacccgcatcgatgtggccgggatgaaggtgcgggagctgatggatgctgagtttccccactccttcctggtgtccgggaagcagcgcaccctggagctgcaagcccggtcccaggaggaaatgatttcctggatgcaggccttccaagcagccattgaccaaatcgagaagcggaatgaaaccttcaaggctgcggcccaggggcctgagggagacatccaggagcaggagctgcagtctgaggagctgggcctccgggcaccgcagtgggtccgggacaagatggtgaccatgtgcatgcgctgccaggagcccttcaacgctctgacgcgccgtcgccaccactgccgggcctgcggctatgtggtgtgtgccaggtgctccgactaccgggccgaactgaaatacgacgacaacaggcccaaccgagtctgcctccactgctacgcattcctcactggaaatgtgctgcctgaggccaaggaggacaagaggcggggcatcctggagaaagggtcctcagccacgcctgaccagagcctgatgtgcagcttcctgcagctcatcggggacaagtggggcaagagcggcccccggggctggtgtgtgatccctcgggatgaccccctcgtgctctatgtctatgctgcccctcaggacatgagggctcacacctccatccccctgctgggctaccaggtgactgttgggccccagggggaccctcgggtcttccagctacagcagtcaggccagctctacaccttcaaggccgagacggaggagctgaagggccgctgggtgaaggccatggagcgggcggccagtggctggagccccagctggcccaacgatggggacctgtccgactgagccactgccagccgctctcctgcccacctctccccaccctgaacccagctcctgccacagactgaccctgtggcctcagtgacccactgccccaagtggtgctttcagagaattgattcagccatctgcgcccaggccacgtgtcccgatctgggattagaaaatatgggtccattcctttctagaaaggggacaaccaagtgtctcagtttgccttgcggggagggggctcctgggccatgggacttccagtgctaaaactgggaaagccccaggtaaccccggactggtggtcaccatagtatggtttttcatttgtatctcctggggagcttttaaagagtactggtgaaaaacacatagtaaattaattttaaaaatgtaaaaaacaatgcctgtactgaagtaccaccaccgatttaaatgggctgagttgggggaggcatggggtctttttttttttttttttgagacagagtcttactctgtttcccaggctggagtgcacaaacatggctcactacagcctcgctctcccgggctccagtgatcctcccgcctcagcctcccaagtagctgggattataggtgtgtgccactgtgccaagctaatttttttattttttgtagagatgggatttcaccatgttactcaggctggtctcaaactcccagcctcaagcgatgctcccacctccacctcccaaagtgctgggattacaggcgtgagccaccatacctggcgcatgcatattttttaagagtacccactggagtctaatatatagcctgggttacctgggatgaagaataaagagagcaaactaccacaaccaatggttgagcccctgtcaagtgccagtcatgatagtagtaataataataataaacatctattggaccagg

SEQ ID NO: 825 - protein, 655 aa, Homo Sapiens
MKGASEEKLASVSNLVTVFENSRTPEAAPRGQRLEDVHHRPECRPPESPGPREKTNVGEAVGSEPRTVSRRYLNSLKNKLSSEAWRKSCQPVTLSGSGTQEPEKKIVQELLETEQAYVARLHLLDQVFFQELLKTARSSKAFPEDVVRVIFSNISSIYQFHSQFFLPELQRRLDDWTANPRIGDVIQKLAPFLKMYSEYVKNFERAAELLATWTDKSPLFQEVLTRIQSSEASGSLTLQHHMLEPVQRIPRYELLLKEYIQKLPAQAPDQADAQKALDMIFSAAQHSNAAITEMERLQDLWEVYQRLGLEDDIVDPSNTLLREGPVLKISFRRNDPMERYLFLFNNMLLYCVPRVIQVGAQFQVRTRIDVAGMKVRELMDAEFPHSFLVSGKQRTLELQARSQEEMISWMQAFQAAIDQIEKRNETFKAAAQGPEGDIQEQELQSEELGLRAPQWVRDKMVTMCMRCQEPFNALTRRRHHCRACGYVVCARCSDYRAELKYDDNRPNRVCLHCYAFLTGNVLPEAKEDKRRGILEKGSSATPDQSLMCSFLQLIGDKWGKSGPRGWCVIPRDDPLVLYVYAAPQDMRAHTSIPLLGYQVTVGPQGDPRVFQLQQSGQLYTFKAETEELKGRWVKAMERAASGWSPSWPNDGDLSD

SEQ ID NO: 826 - DNA, 789 bp, Homo Sapiens
gagaagagcactgattggctgaggcagaaaagtgcccctgcctcggcgctttcggttttggctgggatcatccgcggcggccgggctcgtggggcgcctggagtgagggttctggttcccgccggcgaggattgttaaaatgagtcttcggaagcaaacccctagtgacttcttaaagcaaatcatcggacgaccagttgtggtaaaattaaattctggagtggattatcgaggggtcctggcttgcctggatggctacatgaatatagccctggagcagacagaagaatatgtaaatggacaactgaagaataagtatggggatgcatttatccgaggaaacaatgtgttgtacatcagtacacagaagagacggatgtgaagacaccaagagagcaacgcttttcatagttggatatatttttttatgaattttttctaatttttgcttcttttgtgatacaatttgtcctctttttataatagttggtgatttttcactgacatgtgagtaagataaatgtatacaattgtggatttaattgtgaaatgttctttcacttgtaagtttcagtcattttcttttacctcgttgtcagtgtacagaatgctaaaataattaaaaaaagacaaaatatacctcttcctacaagattatttaacttaagtttcgagaagtgtcatttcatttgacttgcttttcttatccagctaaaatgatgcatatattttatatattgtatggacatataattaaaacattttggaggaatcctcctttattgcaaa

SEQ ID NO: 827 - protein, 80 aa, Homo Sapiens
MSLRKQTPSDFLKQIIGRPVVVKLNSGVDYRGVLACLDGYMNIALEQTEEYVNGQLKNKYGDAFIRGNNVLYISTQKRRM

SEQ ID NO: 828 - DNA, 3311 bp, Homo Sapiens
aaagcctcggctacttccgagggggtgagtggcttcaccgccggtcccttgcagcgctgcctttcgatctctccacatctcggtggcgcgggatctcaagatgcgcctccacctgctcctgctgctcgcgctgtgcggtgcaggcaccaccgccgcggagctcagttacagcttgcgtggcaactggagcatctgcaatgggaacggctcgctggagctgcccggggcggtccctggctgcgtgcacagcgccttgttccagcagggcctgatccaggattcttactacagatttaatgaccttaactacagatgggtctctttggataactggacctatagcaaagaatttaaaatcccctttgaaattagcaaatggcaaaaagtaaatttgattcttgagggagtggatacggtttcaaaaatcctgttcaatgaagtcactattggggaaacagacaatatgttcaatagatatagctttgatattaccaacgtggtcagggacgtgaactccattgagctgcgtttccagtcagcggtgttgtatgcagcacagcagagcaaagctcacactcgctaccaggttcccccagactgccctccacttgtgcagaagggtgaatgccatgtcaactttgttcggaaggagcaatgttcctttagttgggactgggggccttcctttcctacccagggaatctggaaagatgttagaattgaagcctataatatttgtcacctgaactacttcacattttccccaatatatgataagagtgcccaggagtggaatctggaaatagagtctacatttgatgttgtcagctcaaagccagttggtggtcaagtgatcgtagccatccctaagttgcaaacacaacagacatacagcattgaacttcaacctgggaaaaggattgttgagctatttgtgaacattagcaagaatattactgtagaaacttggtggcctcatggacatggaaaccagactgggtacaacatgactgttctttttgaactggatggaggcttaaatattgaaaaatcagctaaggtttattttaggacagtggaacttatagaagagcctataaaagggtctcctggtttgagtttctatttcaaaattaatggatttcccatatttctaaaaggctcaaactggatcccagcagattcattccaggaccgagtaacctctgagttgttacggctccttttacagtctgttgtggatgctaatatgaatactcttcgggtttggggaggaggaatttatgagcaggatgaattctatgaactctgtgatgaactaggaataatggtatggcaggattttatgtttgcctgtgccctttatccaactgatcagggcttcctggattcagtgacagcagaagttgcctaccagatcaagagactgaaatctcatccttctatcatcatatggagtggcaataatgaaaatgaggaggcgctgatgatgaattggtatcatatcagtttcactgaccggccaatctacatcaaggactatgtgacactctatgtgaaaaacatcagagagctcgtactggcaggagacaagagtcgtccttttattacgtccagtcctacaaatggggctgaaactgttgcagaagcctgggtctctcaaaaccctaatagcaattattttggtgatgtacatttttatgactatatcagtgattgctggaactggaaagttttcccaaaagctcgatttgcatctgaatatggatatcagtcctggccgtccttcagtacattagaaaaggtctcgtctacagaggactggtctttcaatagcaagttttcacttcatcgacaacatcacgaaggtggtaacaaacaaatgctttatcaggctggacttcatttcaaactcccccaaagcacagatccattacgcacatttaaagataccatctaccttactcaggtgatgcaggcccagtgtgtcaaaacagaaactgaattctaccgccgtagtcgcagcgagatagtggatcagcaagggcacacgatgggggcactttattggcagttgaatgacatctggcaagctccttcctgggcttctcttgagtacggaggaaagtggaaaatgcttcattactttgctcagaatttctttgctccactgttgccagtaggctttgagaatgaaaacacgttctatatctatggtgtgtcagatcttcactcggattattcgatgacactcagtgtgagagtccatacatggagctccctggagcccgtgtgctctcgtgtgactgaacgttttgtgatgaaaggaggagaggctgtctgcctttatgaggagccagtgtctgaattgctgaggagatgtgggaattgcacacgggaaagctgtgtggtttccttttacctttcagctgaccatgaactcctgagcccgaccaactaccacttcttgtcctcaccgaaggaggccgtggggctctgcaaggcgcagatcactgccatcatctctcagcaaggtgacatatttgtttttgacctggagacctcagctgtcgctccctttgtttggttggatgtaggaagcatcccagggagatttagtgacaatggtttcctcatgactgagaagacacgaactatattattttacccttgggagcccaccagcaagaatgagttggagcaatcttttcatgtgacctccttaacagatatttactgaaggaatctaggttgtattttcagtggacaatgggaataaagcatttctaaagcaccgactggagaggaaggcaacagagacaaggagagaagccgagagacatgtctgcgtgctgccacgcatttgagcgattgctctgtgaagagttgtacactgaacactttcaggggaggctgtttacccaggcaatgtcctcaaacaagcctgtgccggggtgtcctggaatctgtgccaggactgtgtttttagcccttcacctctcagctttagcaggacatgaaccagttataacaagatggccctgcagctggttacaagaatgtgacatggcaggatctatggaaccaaatggaaggttttgaggtgatgtaggtctttcacagctagctttggggaatacggaatactcaaataaagtgctttgttattatttcagagggaatggcgattgaaatgttacaacagagatttcttggtggtagctatttgggtaaaggtatatgggtatttttctgtacatgtgaaattatataaaaataaaagttatataaattacattgacaacttgata

SEQ ID NO: 829 - protein, 879 aa, Homo Sapiens
MRLHLLLLLALCGAGTTAAELSYSLRGNWSICNGNGSLELPGAVPGCVHSALFQQGLIQDSYYRFNDLNYRWVSLDNWTYSKEFKIPFEISKWQKVNLILEGVDTVSKILFNEVTIGETDNMFNRYSFDITNVVRDVNSIELRFQSAVLYAAQQSKAHTRYQVPPDCPPLVQKGECHVNFVRKEQCSFSWDWGPSFPTQGIWKDVRIEAYNICHLNYFTFSPIYDKSAQEWNLEIESTFDVVSSKPVGGQVIVAIPKLQTQQTYSIELQPGKRIVELFVNISKNITVETWWPHGHGNQTGYNMTVLFELDGGLNIEKSAKVYFRTVELIEEPIKGSPGLSFYFKINGFPIFLKGSNWIPADSFQDRVTSELLRLLLQSVVDANMNTLRVWGGGIYEQDEFYELCDELGIMVWQDFMFACALYPTDQGFLDSVTAEVAYQIKRLKSHPSIIIWSGNNENEEALMMNWYHISFTDRPIYIKDYVTLYVKNIRELVLAGDKSRPFITSSPTNGAETVAEAWVSQNPNSNYFGDVHFYDYISDCWNWKVFPKARFASEYGYQSWPSFSTLEKVSSTEDWSFNSKFSLHRQHHEGGNKQMLYQAGLHFKLPQSTDPLRTFKDTIYLTQVMQAQCVKTETEFYRRSRSEIVDQQGHTMGALYWQLNDIWQAPSWASLEYGGKWKMLHYFAQNFFAPLLPVGFENENTFYIYGVSDLHSDYSMTLSVRVHTWSSLEPVCSRVTERFVMKGGEAVCLYEEPVSELLRRCGNCTRESCVVSFYLSADHELLSPTNYHFLSSPKEAVGLCKAQITAIISQQGDIFVFDLETSAVAPFVWLDVGSIPGRFSDNGFLMTEKTRTILFYPWEPTSKNELEQSFHVTSLTDIY

SEQ ID NO: 830 - DNA, 1759 bp, Homo Sapiens
aagttcaagggcgagagtgagtaccagcagaaggctgggagtctgtagtttgttcctgctgccaggctccactgaggggaacggggacctgtctgaagagaagatgcccctgctgacactctacctgctcctcttctggctctcaggctactccattgtcactcaaatcaccggtccaacaacagtgaatggcttggagcggggctccttgaccgtgcagtgtgtttacagatcaggctgggagacctacttgaagtggtggtgtcgaggagctatttggcgtgactgcaagatccttgttaaaaccagtgggtcagagcaggaggtgaagagggaccgggtgtccatcaaggacaatcagaaaaaccgcacgttcactgtgaccatggaggatctcatgaaaactgatgctgacacttactggtgtggaattgagaaaactggaaatgaccttggggtcacagttcaagtgaccattgacccagcaccagtcacccaagaagaaactagcagctccccaactctgaccggccaccacttggacaacaggcacaagctcctgaagctcagtgtcctcctgcccctcatcttcaccatattgctgctgcttttggtggccgcctcactcttggcttggaggatgatgaagtaccagcagaaagcagccgggatgtccccagagcaggtactgcagcccctggagggcgacctctgctatgcagacctgaccctgcagctggccggaacctccccgcaaaaggctaccacgaagctttcctctgcccaggttgaccaggtggaagtggaatatgtcaccatggcttccttgccgaaggaggacatttcctatgcatctctgaccttgggtgctgaggatcaggaaccgacctactgcaacatgggccacctcagtagccacctccccggcaggggccctgaggagcccacggaatacagcaccatcagcaggccttagcctgcactccaggctccttcttggaccccaggctgtgagcacactcctgcctcatcgaccgtctgccccctgctcccctcatcaggaccaacccggggactggtgcctctgcctgatcagccagcattgcccctagctctgggttgggcttggggccaagtctcagggggcttctaggagttggggttttctaaacgtcccctcctctcctacatagttgaggagggggctagggatatgctctggggctttcatgggaatgatgaagatgataatgagaaaaatgttatcattattatcatgaagtaccattatcgtaatacaatgaacctttatttattgcctaccacatgttatgggctgaataatggcccccaaagatatctgtgtcctaatcctcagaacctgtgactgttaccttctgtggcagaaagggacagtgcagatgtatgtaagttaaggactttgagatagagaggttattcttgctgattcaggtgggcccaaaatatcaccacaagggtcctcataagaaagaggccagaaggtcaaagaggtagagacaaagtgatgatggaagtggacgtgggtgtgacgtgagcaggggccatgaatgccgcagccttcagatgccagaaagggaaaggaatggattcccctgcctggagcctccaaaagaaaccagccctgcccacgccttgacttgagcccattgaaactgatcttgagctcctggcctccagaattgcaggagaataaatttgtgttgtttttaatgagcca

SEQ ID NO: 831 - protein, 290 aa, Homo Sapiens
MPLLTLYLLLFWLSGYSIVTQITGPTTVNGLERGSLTVQCVYRSGWETYLKWWCRGAIWRDCKILVKTSGSEQEVKRDRVSIKDNQKNRTFTVTMEDLMKTDADTYWCGIEKTGNDLGVTVQVTIDPAPVTQEETSSSPTLTGHHLDNRHKLLKLSVLLPLIFTILLLLLVAASLLAWRMMKYQQKAAGMSPEQVLQPLEGDLCYADLTLQLAGTSPQKATTKLSSAQVDQVEVEYVTMASLPKEDISYASLTLGAEDQEPTYCNMGHLSSHLPGRGPEEPTEYSTISRP

SEQ ID NO: 832 - DNA, 2723 bp, Homo Sapiens
agtctgagcccagagagccgcggggaccatggagccggtgccgctgcaggacttcgtgcgcgccttggaccccgcctccctcccgcgcgtgctgcgggtctgctcgggggtctacttcgagggctccatctatgagatctctgggaatgagtgctgcctctccacgggggacctgatcaaggtcacccaggtccgcctccagaaggtggtctgtgagaacccgaagaccagccagaccatggagctcgcccccaacttccagggctacttcacccccctcaacaccccacagagctatgaaaccctggaggagctggtctctgccacaactcagagctccaagcagctgcccacttgcttcatgtcgacccacaggattgtcacagagggcagggtggtgactgaggaccagctcctcatgcttgaggctgtggtgatgcacctcgggatccgctctgcccgctgtgtcctgggcatggagggtcagcaggtcatcctgcacctgcccctatcccagaaggggcccttctggacatgggagcctagtgcccctcgaactctgctccaggtcctacaggatccagccctgaaagacctcgtcctcacctgccccaccctgccctggcattccctgatcctgcggccccagtatgagatccaagccatcatgcacatgcgcaggaccattgtcaagatcccttctaccctggaggtcgacgtggaggacgtcaccgcctcctcccggcacgtccactttatcaaaccgctgctgctgagcgaggtcctggcctgggaaggccctttccccctgtccatggagatcctggaggttcctgagggccgccccatcttcctcagcccgtgggtgggctccttgcaaaaaggccagaggctttgcgtctatggcctagcctcaccaccctggcgggtcctggcctcaagcaagggccgcaaggtgcccaggcacttcctggtgtcagggggctaccaaggcaagctgcggcggcggccaagggagttccccacggcctatgacctcctaggtgctttccagccaggccggccactccgggtggtggccacaaaggactgtgagggcgagagggaggagaatcccgagttcacgtccctggctgtgggtgaccggctggaggtgctggggcctggccaggcccatggggcccagggcagtgacgtggatgtcttggtttgtcagcggctgagtgaccaggctggggaggatgaggaggaagagtgcaaagaggaggcagagagcccagagcgggtcctgctgcccttccacttccctggcagtttcgtggaggagatgagtgacagccggcgctacagcctggcagatctgactgcccagttttcactgccttgtgaggtcaaggtggtggccaaggacaccagccaccccactgaccctctgacctccttcctgggcctgcggctggaggagaagatcacagagccattcttggtggtgagcctagactctgagcctgggatgtgctttgagatccctccccggtggctggacctgactgttgtgaaggccaaggggcagccagacttgccagaggggtctctccccatagccacagtggaggagctgacagacaccttctattatcgtcttcggaagttaccagcctgtgagatccaagcccccccacccaggccccctaaaaatcagggcctcagcaagcagaggagacacagcagtgagggaggcgtcaagtcttctcaagtcttaggattgcagcaacacgctcggctgcccaaacccaaggcgaagaccttgccagagttcatcaaggatggctccagtacgtacagcaagattcctgcccacaggaagggccacaggcccgctaagccccaaaggcaggatctagatgatgatgaacatgattatgaagaaatacttgagcaatttcagaaaaccatctaagtgctggaggaaccacgcttcctaactgctgcttctcagggaatccgacaccagccaaccattttaagcctctaaaagacctcgggcaagtctcacagaaactgagctgcagacggggagtagctttgtggaaactgatttgatggacactgcaccagcttccttcaggttctagattcttgctacttagggcgggctggtttggacctaacatctcgcacgtgactccctcagcctcagagccttgggatgcagagcagctggcagggttcctctcaatcctgcaaccccagctgtcccaccggtggatgcagaggggaatccgaggccatcaaccttggtgacagcagcgcagtgccaatgctgatcacactgcatgggagattttgttaacgtctgccacccccactctcacccccaagctctaagcccccgggaggcctggactgtcttcctcatctctgtagcaccaagcctgatagatctgtatatggtaaacaggggtttaaccacatgtggttaacatggattaatgtgggaacttggcttcaagaacacaaccttaggaccttgggccccaaaagctggtggtgaaatgaggaggagccaatttaagaagacccttatggagacctgaggctgcagaaactggtaggtttcatcaggtggttaaagtcgtcaaagttgtaagtgactaaccaagattatttcattttaaaaccatagaataaaaatgacacctgagcttctctatgaatgaaaa

SEQ ID NO: 833 - protein, 643 aa, Homo Sapiens
MEPVPLQDFVRALDPASLPRVLRVCSGVYFEGSIYEISGNECCLSTGDLIKVTQVRLQKVVCENPKTSQTMELAPNFQGYFTPLNTPQSYETLEELVSATTQSSKQLPTCFMSTHRIVTEGRVVTEDQLLMLEAVVMHLGIRSARCVLGMEGQQVILHLPLSQKGPFWTWEPSAPRTLLQVLQDPALKDLVLTCPTLPWHSLILRPQYEIQAIMHMRRTIVKIPSTLEVDVEDVTASSRHVHFIKPLLLSEVLAWEGPFPLSMEILEVPEGRPIFLSPWVGSLQKGQRLCVYGLASPPWRVLASSKGRKVPRHFLVSGGYQGKLRRRPREFPTAYDLLGAFQPGRPLRVVATKDCEGEREENPEFTSLAVGDRLEVLGPGQAHGAQGSDVDVLVCQRLSDQAGEDEEEECKEEAESPERVLLPFHFPGSFVEEMSDSRRYSLADLTAQFSLPCEVKVVAKDTSHPTDPLTSFLGLRLEEKITEPFLVVSLDSEPGMCFEIPPRWLDLTVVKAKGQPDLPEGSLPIATVEELTDTFYYRLRKLPACEIQAPPPRPPKNQGLSKQRRHSSEGGVKSSQVLGLQQHARLPKPKAKTLPEFIKDGSSTYSKIPAHRKGHRPAKPQRQDLDDDEHDYEEILEQFQKTI

SEQ ID NO: 834 - DNA, 7014 bp, Homo Sapiens
cggggaccgcgacgagcccgggtcgccgttggcagcagcagcagcaacaccagcagcagcagcagccccggcggcggcgcggaccccgagcgcccgggcgcaccccggcttcccggagcgcgacgcggcggcagcagccccggtgcggccgcgcgcgccttaggctcggccccgcggctcggggaccccgactcccggcccagcgagcgcgtcccccggcgccgcccgagagcccgaggaggcagcggccgcaggcagccggggaggggggcggccaccgcccgcgccgggcatcctcaggagccccagagcgcggagggcgcggcgccgccgagcggtgctggcccccgcgggcctccccggaccttccccaccgcctgggcccgagggacgcgtgatcgggcgggcggccgggcgcaagggtgggagggagccgcccccgcccgcgccccctccgcccctcgccccaacccctgggcgccgggcccgggccgcgcggcctgaagcgcccgcgatggcgagcccgccgcggcacgggccgcccgggccggcgagcggagacggccccaacctcaacaacaacaacaacaacaacaaccacagcgtgcgcaagtgcggctacctgcgcaagcagaagcatggccacaagcgcttcttcgtgctgcgcggacccggcgcgggcggcgacgaggcgacggcgggcggggggtcggcgccgcaaccgccgcggctcgagtactacgagagcgagaaaaagtggcggagcaaggcaggcgcgccgaaacgggtgatcgctctcgactgctgcctgaacatcaacaagcgcgccgacgccaagcacaagtacctgatcgccctctacaccaaggacgagtacttcgccgtggccgccgagaacgagcaggagcaggagggctggtaccgcgcgctcaccgacctggtcagcgagggccgcgcggccgccggagacgcgccccccgccgccgcgcccgccgcgtcctgcagcgcctccctgcccggcgccctgggcggctctgccggcgccgccggggccgaggacagctacgggctggtggctcccgccacggccgcctaccgtgaggtgtggcaggtgaacctgaagcccaagggtctgggccagagcaagaacctgacgggggtgtaccgtctgtgcctgtctgcgcgcaccatcggcttcgtgaagctcaactgcgagcagccgtcggtgacgctgcagctcatgaacatccgccgctgcggccactcggacagcttcttcttcatcgaggtgggccgctcggccgtcacaggccccggcgagctgtggatgcaggcggacgactcggtggtggcgcagaacatccacgagaccatcctggaggccatgaaggcgctcaaggagctcttcgagttccggccgcgcagtaagagccaatcgtcggggtcgtcggccacgcaccccatcagcgtccccggcgcgcgccgccaccaccacctggtcaacctgccccccagccagacgggcctggtgcgccgctcgcgcaccgacagcctggccgccaccccgccggcggccaagtgcagctcgtgccgggtgcgcaccgccagcgagggcgacggcggcgcggcggcgggagcggcggccgcgggcgccaggccggtgtcggtggctgggagccccctgagccccgggccggtgcgcgcgcccctgagccgctcgcacaccctgagcggcggctgcggcggccgcgggagcaaggtggcgctgctgccggcagggggcgcgctgcaacacagccgctccatgtccatgcccgtggcgcactcgccgcccgccgccaccagccccggctccctgtcgtccagcagcggccacggctcgggctcctacccgccgccgcccggcccgcacccgcctctgccgcatccgctgcaccacggccccggccagcggccctccagcggcagcgcctccgcctcgggctcccccagcgaccccggcttcatgtccctggacgagtacggctccagcccaggcgacctgcgcgccttctgcagccaccgaagcaacacgcccgagtccatcgcggagacgcccccggcccgagacggcggcggcggcggtgagttctacgggtacatgaccatggacaggcccctgagccactgtggccgctcctaccgccgggtctcgggggacgcggcccaggacctggaccgagggctgcgcaagaggacctactccctgaccacgccagcccggcagcggccggtgccccagccctcctctgcctcgctggatgaatacaccctgatgcgggccaccttctcgggcagcgcgggccgcctctgcccgtcctgccccgcgtcctctcccaaggtggcctaccacccctacccagaggactacggagacatcgagatcggctcccacaggagctccagcagcaacctgggggcagacgacggctacatgcccatgacgcccggcgcggccctcgcgggcagtgggagcggcagctgcaggagcgacgactacatgcccatgagccccgccagcgtgtccgcccccaagcagatcttgcagcccagggccgccgccgccgccgccgccgccgtgccttctgcggggcctgcggggccagcacccacctctgcggcgggcaggacattcccggcgagcgggggcggctacaaggccagctcgcccgccgagagctcccccgaggacagtgggtacatgcgcatgtggtgcggttccaagctgtccatggagcatgcagatggcaagctgctgcccaacggggactacctcaacgtgtcccccagcgacgcggtcaccacgggcaccccgcccgacttcttctccgcagccctgcaccccggcggggagccgctcaggggcgttcccggctgctgctacagctccttgccccgctcctacaaggccccctacacctgtggcggggacagcgaccagtacgtgctcatgagctcccccgtggggcgcatcctggaggaggagcgtctggagcctcaggccacgccagggcccagccaggcggccagcgccttcggggccggccccacgcagccccctcaccctgtagtgccttcgcccgtgcggcctagcggcggccgcccggagggcttcttgggccagcgcggccgggcggtgaggcccacgcgcctgtccctggaggggctgcccagcctgcccagcatgcacgagtacccactgccaccggagcccaagagccccggcgagtacatcaacatcgactttggcgagcccggggcccgcctgtcgccgcccgcgcctcccctgctggcgtcggcggcctcgtcctcctcgctcttgtccgccagcagcccggcctcgtcgctgggctcaggcaccccgggcaccagcagcgacagccggcagcggtctccgctctccgactacatgaacctcgacttcagctcccccaagtctcctaagccgggcgccccgagcggccaccccgtgggctccttggacggcctcctgtcccccgaggcctcctccccgtatccgccgttgcccccgcgtccgtccgcgtccccgtcgtcgtctctgcagccgccgccaccgccgccggccccgggggagctgtaccgcctgccccccgcctcggccgttgccaccgcccagggcccgggcgccgcctcatcgttgtcctcggacaccggggacaatggtgactacaccgagatggcttttggtgtggccgccaccccgccgcaacctatcgcggcccccccgaagccagaagctgcccgcgtggccagcccgacgtcgggcgtgaagaggctgagcctcatggagcaggtgtcgggagtcgaggccttcctgcaggccagccagcccccggacccccaccgcggcgccaaggtcatccgcgcagacccgcaggggggccgccgccgccacagttccgagaccttctcctccaccacgacggtcacccccgtgtccccgtccttcgcccacaaccccaagcgccacaactcggcctccgtggaaaatgtctctctcaggaaaagcagcgagggcggcgtgggtgtcggccctggagggggcgacgagccgcccacctccccacgacagttgcagccggcgccccctttggcaccgcagggccggccgtggaccccgggtcagcccgggggcttggtcggttgtcctgggagcggtggatcgcccatgcgcagagagacctctgccggcttccagaatggtctcaactacatcgccatcgacgtgagggaggagcccgggctgccaccccagccgcagccgccgccgccgccgcttcctcagccgggagacaagagctcctggggccggacccgaagcctcgggggtctcatcagcgctgtgggcgtcggcagcaccggcggcgggtgcggggggccgggtcccggtgccctgccccctgccaacacctacgccagcattgacttcttgtcccaccacttgaaggaggccaccatcgtgaaagagtgaagatctgtctggctttatcaccaggatgtcacatgtcagagagtatcattaaaagaagacgctcagcactgtttcagcccgaagctgcttgcagttttcttttggatctgagcaatgactgtgtttggaaacatctgtggactctgttagatgaggcaccaacaaggcaaggtcacctgcctctttcccttgttcccggatggggcattcatcattgtgctgtttgcgttttgttttgttttgttttaacaaaattagctgaagaagttattctcaagaaaattggatgttttcattggccttcttaaattgtggccagtgtcttttaatttcttcttcttttccttttggcaaagcagatataaccctcagcatgctaggagagtgcacccgtacctatggaagtggtaaaatctggtatttactggcttacactcaaaacgaccacagtcctacctcagttcaaggtaaagccggatttccgtggcgggggtcccacaggacctcctgtagtagcccctgcgctgtgtgtctggagcgcggtcctcggccttattgaaatggtccaagtagacagctgcttgttggattccagtgcaggtacctgcgatgtttacgtccacaccgagcccagtgtgggactgacatttctcaatggaagtgaaatttgggattggactttgaagacggattactaaataataattattatatgtaactgaagcaacctacttttgaaaatcaactgtattgggtagtgggaggtgggagggaagggctttgggaaggggatgaatatctctttttacctttaacagacttgtttaatcttctcgatgtagatgtttatgtaggtacttcacattgcaaacgccttttattctatttacaagctcagatgtctctgctctcctgaatcttgggcatgcctttctgtaaccaaaaatccctgtaggcgtgctagcaattccagggtggtccgggtttggcagatttgatttttaaaaaacgtattatctttaataaaatgttattatgtcaaccagtgaggctgccctgaacaaaaaaaacaaaaagaaaaaaaaaaaaggaaagaaagaaactgataaaaagaggcattccagcccctatgttattgatggaaaaagaaaaagaagaaaagcaatctcgcagtacatgttacttgtcgaaaaaattccggacaagactacccttgttttatgttttcagtattctgaaaataccagtgtgtggcagttctcgcagatgttacctaaaactgctgaacttgaccggcagaatgttctgccgttttctgctccctcgacacttgattggagggctgtcgacctctcctcccgtgggggcttccccagtgcctatcttctctgatagtcatggagaggttacactaattcattggagatgtaagttgttggttttgttttgttttgtttttagaaaaatatatataaatatataatagatatctatcgctatagaataatgcattaataaaatgaggcttttttagaggaagaccaaaaaattcaatgtcttaaaaatatatttaatggcaatgcaaaagtcttcctgcttccgtgctgaactttagaacagaggattgtattgcaagacaaagttgaatgtaaagtgatctccctgaacatttttaaggttttacttttctgaaattatacatcacagcagtgcataggccatataatgttagctggaaggtcaatttcagtgtatgatatactttattaagatgtataaaaatcctgaagtttttatttagttttgggaataggcatcaatgggtggtatttgctttgtaactccccccaggtacgatagggactgaatatggaccctgctgaaagcagtgtattgacgcatatttaactcgccctctatccgtagagtagtcatgacactatacagatggttcgtgttcatactgcagcttaaaacaagcaaaatacacagatgataatatgctaaattttcctctatcctgtacatttcacaaaaaggcatatgcaatatttacatttttaatttagtttacagaatggaaccaaaatgtataaatgttatgtttgctaaaacttcacaatgtatattgggtctttgtacattttgcctgacttaccttaaatttaaaatattttttgctatataaactttaacagttattaaacagtgttttctttttgggtacgtattgtttctggatatcaagatgttaaatatatttcttgctattgtgatatgacaagagacttaacttatcttgctctgtcttccactgtacacgctgtatataggggtcaatgtgatgctgctggagacgagaataaactggactagaatagtgcattgtatttagtctgtattgatcatggatgccctccttaatagccatatgcaataaaataaagtacattatttatgaaatgaaaaaaaaaaaaaaaaaa

SEQ ID NO: 835 - protein, 1338 aa, Homo Sapiens
MASPPRHGPPGPASGDGPNLNNNNNNNNHSVRKCGYLRKQKHGHKRFFVLRGPGAGGDEATAGGGSAPQPPRLEYYESEKKWRSKAGAPKRVIALDCCLNINKRADAKHKYLIALYTKDEYFAVAAENEQEQEGWYRALTDLVSEGRAAAGDAPPAAAPAASCSASLPGALGGSAGAAGAEDSYGLVAPATAAYREVWQVNLKPKGLGQSKNLTGVYRLCLSARTIGFVKLNCEQPSVTLQLMNIRRCGHSDSFFFIEVGRSAVTGPGELWMQADDSVVAQNIHETILEAMKALKELFEFRPRSKSQSSGSSATHPISVPGARRHHHLVNLPPSQTGLVRRSRTDSLAATPPAAKCSSCRVRTASEGDGGAAAGAAAAGARPVSVAGSPLSPGPVRAPLSRSHTLSGGCGGRGSKVALLPAGGALQHSRSMSMPVAHSPPAATSPGSLSSSSGHGSGSYPPPPGPHPPLPHPLHHGPGQRPSSGSASASGSPSDPGFMSLDEYGSSPGDLRAFCSHRSNTPESIAETPPARDGGGGGEFYGYMTMDRPLSHCGRSYRRVSGDAAQDLDRGLRKRTYSLTTPARQRPVPQPSSASLDEYTLMRATFSGSAGRLCPSCPASSPKVAYHPYPEDYGDIEIGSHRSSSSNLGADDGYMPMTPGAALAGSGSGSCRSDDYMPMSPASVSAPKQILQPRAAAAAAAAVPSAGPAGPAPTSAAGRTFPASGGGYKASSPAESSPEDSGYMRMWCGSKLSMEHADGKLLPNGDYLNVSPSDAVTTGTPPDFFSAALHPGGEPLRGVPGCCYSSLPRSYKAPYTCGGDSDQYVLMSSPVGRILEEERLEPQATPGPSQAASAFGAGPTQPPHPVVPSPVRPSGGRPEGFLGQRGRAVRPTRLSLEGLPSLPSMHEYPLPPEPKSPGEYINIDFGEPGARLSPPAPPLLASAASSSSLLSASSPASSLGSGTPGTSSDSRQRSPLSDYMNLDFSSPKSPKPGAPSGHPVGSLDGLLSPEASSPYPPLPPRPSASPSSSLQPPPPPPAPGELYRLPPASAVATAQGPGAASSLSSDTGDNGDYTEMAFGVAATPPQPIAAPPKPEAARVASPTSGVKRLSLMEQVSGVEAFLQASQPPDPHRGAKVIRADPQGGRRRHSSETFSSTTTVTPVSPSFAHNPKRHNSASVENVSLRKSSEGGVGVGPGGGDEPPTSPRQLQPAPPLAPQGRPWTPGQPGGLVGCPGSGGSPMRRETSAGFQNGLNYIAIDVREEPGLPPQPQPPPPPLPQPGDKSSWGRTRSLGGLISAVGVGSTGGGCGGPGPGALPPANTYASIDFLSHHLKEATIVKE

SEQ ID NO: 836 - DNA, 2113 bp, Homo Sapiens
tcccaatcccggggcggccgggcgggggtgggcagggggcgtgaggccgcccctgcgtcccgggggccccccgaaaacgcgctccgggtgcccggtccctccgctgcgccctgccgccgtcctcccgggggtctcgggcggccgcggccgtgtccttcgcgtcccggcggcgcggcgggaggggccggcgtgacgcagcggttgctacgggccgcccttataaataaccgggctcaggagaaactttagcgagtcagagccgcgcacgggactgggaaggggacccacccgagggtccagccaccagccccctcactaatagcggccaccccggcagcggcggcagcagcagcagcgacgcagcggcgacagctcagagcagggaggccgcgccacctgcgggccggccggagcgggcagccccaggccccctccccgggcacccgcgttcatgcaacgcctggtggcctgggacccagcatgtctccccctgccgccgccgccgcctgcctttaaatccatggaagtggccaacttctactacgaggcggactgcttggctgctgcgtacggcggcaaggcggcccccgcggcgccccccgcggccagacccgggccgcgcccccccgccggcgagctgggcagcatcggcgaccacgagcgcgccatcgacttcagcccgtacctggagccgctgggcgcgccgcaggccccggcgcccgccacggccacggacaccttcgaggcggctccgcccgcgcccgcccccgcgcccgcctcctccgggcagcaccacgacttcctctccgacctcttctccgacgactacgggggcaagaactgcaagaagccggccgagtacggctacgtgagcctggggcgcctgggggccgccaagggcgcgctgcaccccggctgcttcgcgcccctgcacccaccgcccccgccgccgccgccgcccgccgagctcaaggcggagccgggcttcgagcccgcggactgcaagcggaaggaggaggccggggcgccgggcggcggcgcaggcatggcggcgggcttcccgtacgcgctgcgcgcttacctcggctaccaggcggtgccgagcggcagcagcgggagcctctccacgtcctcctcgtccagcccgcccggcacgccgagccccgctgacgccaaggcgcccccgaccgcctgctacgcgggggccgcgccggcgccctcgcaggtcaagagcaaggccaagaagaccgtggacaagcacagcgacgagtacaagatccggcgcgagcgcaacaacatcgccgtgcgcaagagccgcgacaaggccaagatgcgcaacctggagacgcagcacaaggtcctggagctcacggccgagaacgagcggctgcagaagaaggtggagcagctgtcgcgcgagctcagcaccctgcggaacttgttcaagcagctgcccgagcccctgctcgcctcctccggccactgctagcgcggcccccgcgcgcgtccccctgccggccggggctgagactccggggagcgcccgcgcccgcgccctcgcccccgcccccggcggcgccggcaaaactttggcactggggcacttggcagcgcggggagcccgtcggtaattttaatattttattatatatatatatctatatttttgtccaaaccaaccgcacatgcagatggggctcccgcccgtggtgttatttaaagaagaaacgtctatgtgtacagatgaatgataaactctctgcttctccctctgcccctctccaggcgccggcgggcgggccggtttcgaagttgatgcaatcggtttaaacatggctgaacgcgtgtgtacacgggactgacgcaacccacgtgtaactgtcagccgggccctgagtaatcgcttaaagatgttcctacgggcttgttgctgttgatgttttgttttgttttgttttttggtctttttttgtattataaaaaataatctatttctatgagaaaagaggcgtctgtatattttgggaatcttttccgtttcaagcattaagaacacttttaataaacttttttttgagaatggttacaaagccttttgggggcagtaaaaaaa

SEQ ID NO: 837 - protein, 345 aa, Homo Sapiens
MQRLVAWDPACLPLPPPPPAFKSMEVANFYYEADCLAAAYGGKAAPAAPPAARPGPRPPAGELGSIGDHERAIDFSPYLEPLGAPQAPAPATATDTFEAAPPAPAPAPASSGQHHDFLSDLFSDDYGGKNCKKPAEYGYVSLGRLGAAKGALHPGCFAPLHPPPPPPPPPAELKAEPGFEPADCKRKEEAGAPGGGAGMAAGFPYALRAYLGYQAVPSGSSGSLSTSSSSSPPGTPSPADAKAPPTACYAGAAPAPSQVKSKAKKTVDKHSDEYKIRRERNNIAVRKSRDKAKMRNLETQHKVLELTAENERLQKKVEQLSRELSTLRNLFKQLPEPLLASSGHC

SEQ ID NO: 838 - DNA, 2571 bp, Homo Sapiens
acccgccacccgccggcccttccgcctcactcagcggcgccactgagagggacgggcgccggccatggagcgcacagcaggcaaagagctggccctggcaccgctgcaggactggggtgaagagaccgaggacggcgcggtgtacagtgtctccctgcggcggcagcgcagtcagcgcaggagcccggcggagggccccgggggcagccaggctcccagccccattgccaataccttcctccactatcgaaccagcaaggtgagggtgctgagggcagcgcgcctggagcggctggtgggagagttggtgtttggagaccgtgagcaggaccccagcttcatgcccgccttcctggccacctaccggacctttgtacccactgcctgcctgctgggctttctgctgccaccaatgccaccgcccccacctcccggggtagagatcaagaagacagcggtacaagatctgagcttcaacaagaacctgagggctgtggtgtcagtgctgggctcctggctgcaggaccaccctcaggatttccgagacccccctgcccattcggacctgggcagtgtccgaacctttctgggctgggcggccccagggagtgctgaggctcaaaaagcagagaagcttctggaagattttttggaggaggctgagcgagagcaggaagaggagccgcctcaggtgtggacaggacctcccagagttgcccaaacttctgacccagactcttcagaggcctgcgcggaggaagaggaagggctcatgcctcaaggtccccagctcctggacttcagcgtggacgaggtggccgagcagctgaccctcatagacttggagctcttctccaaggtgaggctctacgagtgcttgggctccgtgtggtcgcagagggaccggccgggggctgcaggcgcctcccccactgtgcgcgccaccgtggcccagttcaacaccgtgaccggctgtgtgctgggttccgtgctcggagcaccgggcttggccgccccgcagagggcgcagcggctggagaagtggatccgcatcgcccagcgctgccgagaactgcggaacttctcctccttgcgcgccatcctgtccgccctgcaatctaaccccatctaccggctcaagcgcagctggggggcagtgagccgggaaccgctatctactttcaggaaactttcgcagattttctccgatgagaacaaccacctcagcagcagagagattcttttccaggaggaggccactgagggatcccaagaagaggacaacaccccaggcagcctgccctcaaaaccacccccaggccctgtcccctaccttggcaccttccttacggacctggttatgctggacacagccctgccggatatgttggagggggatctcattaactttgagaagaggaggaaggagtgggagatcctggcccgcatccagcagctgcagaggcgctgtcagagctacaccctgagcccccacccgcccatcctggctgccctgcatgcccagaaccagctcaccgaggagcagagctaccggctctcccgggtcattgagccaccagctgcctcctgccccagctccccacgcatccgacggcggatcagcctcaccaagcgtctcagtgcgaagcttgcccgagagaaaagctcatcacctagtgggagtcccggggacccctcatcccccacctccagcctctgcatctcccccagtgtgtccccagggtcacccccctcaagtcctagaagcagagatgctcctgctggcagtcccccggcctctccagggccccagggccccagcaccaagctgcccctgagcctggacctgcccagcccccggcccttcgctttgcctctgggcagccctcgaatccccctcccggcgcagcagagctcggaggcccgtgtcatccgcgtcagcatcgacaatgaccacgggaacctgtatcgaagcatcttgctgaccagtcaggacaaagcccccagcgtggtccggcgagccttgcagaagcacaatgtgccccagccctgggcctgtgactatcagctctttcaagtccttcctggggaccgggtgctcctgattcctgacaatgccaacgtcttctatgccatgagtccagtcgcccccagagacttcatgctgcggcggaaagaggggacccggaacactctgtctgtctccccaagctgaggcagccctgtcctctccacaagacacaagtcccacaggcaagcttgcgactcttctcctggaaagctgccatcccccagtagaggccactgtgctgtgtatcccaggaccaccacccaactgtagcccattggaccccatctctttttctgactctgttggtactagatccatattccaaagacatcagcccatgggtggctggtggagagctcaatcccataaatgtagaaagaggtggggcatggatacgtcaaatccctccccagagaaatcttataaatgttagagacgcatcagaagtgacagatgcggatgaaaatagtgaccagagttatgaaacaggaaaaaaaaaa

SEQ ID NO: 839 - protein, 716 aa, Homo Sapiens
MERTAGKELALAPLQDWGEETEDGAVYSVSLRRQRSQRRSPAEGPGGSQAPSPIANTFLHYRTSKVRVLRAARLERLVGELVFGDREQDPSFMPAFLATYRTFVPTACLLGFLLPPMPPPPPPGVEIKKTAVQDLSFNKNLRAVVSVLGSWLQDHPQDFRDPPAHSDLGSVRTFLGWAAPGSAEAQKAEKLLEDFLEEAEREQEEEPPQVWTGPPRVAQTSDPDSSEACAEEEEGLMPQGPQLLDFSVDEVAEQLTLIDLELFSKVRLYECLGSVWSQRDRPGAAGASPTVRATVAQFNTVTGCVLGSVLGAPGLAAPQRAQRLEKWIRIAQRCRELRNFSSLRAILSALQSNPIYRLKRSWGAVSREPLSTFRKLSQIFSDENNHLSSREILFQEEATEGSQEEDNTPGSLPSKPPPGPVPYLGTFLTDLVMLDTALPDMLEGDLINFEKRRKEWEILARIQQLQRRCQSYTLSPHPPILAALHAQNQLTEEQSYRLSRVIEPPAASCPSSPRIRRRISLTKRLSAKLAREKSSSPSGSPGDPSSPTSSLCISPSVSPGSPPSSPRSRDAPAGSPPASPGPQGPSTKLPLSLDLPSPRPFALPLGSPRIPLPAQQSSEARVIRVSIDNDHGNLYRSILLTSQDKAPSVVRRALQKHNVPQPWACDYQLFQVLPGDRVLLIPDNANVFYAMSPVAPRDFMLRRKEGTRNTLSVSPS

SEQ ID NO: 840 - DNA, 15245 bp, Homo Sapiens
cgctccgcccgcccggccgccccgagccccgagccccgagccccccgcgccgggcccgggcggcagcggcggcggcggcggcggcggcgcgcccggccccctcccccggcgccggccacgggaggcggtgatgcgggcgcgggcggcctcggctgcgccgagagcggagacacaggctcaagatggcagattccgactgaggctgggggggccgagctcgcgcgccgctttcccgtccccgttgccatgaaccgcggacaccccggccccgatggcccccgtgtacgaaggtatggcctcacatgtgcaagttttctcccctcacacccttcaatcaagtgccttctgtagtgtgaagaaactgaaaatagagccgagttccaactgggacatgactgggtacggctcccacagcaaagtgtatagccagagcaagaacatccccctgtcgcagccagccaccacaaccgtcagcacctccttgccggtcccaaacccaagcctaccttacgagcagaccatcgtcttcccaggaagcaccgggcacatcgtggtcacctcagcaagcagcacttctgtcaccgggcaagtcctcggcggaccacacaacctaatgcgtcgaagcactgtgagcctccttgatacctaccaaaaatgtggactcaagcgtaagagcgaggagatcgagaacacaagcagcgtgcagatcatcgaggagcatccacccatgattcagaataatgcaagcggggccactgtcgccactgccaccacgtctactgccacctccaaaaacagcggctccaacagcgagggcgactatcagctggtgcagcatgaggtgctgtgctccatgaccaacacctacgaggtcttagagttcttgggccgagggacgtttgggcaagtggtcaagtgctggaaacggggcaccaatgagatcgtagccatcaagatcctgaagaaccacccatcctatgcccgacaaggtcagattgaagtgagcatcctggcccggttgagcacggagagtgccgatgactataacttcgtccgggcctacgaatgcttccagcacaagaaccacacgtgcttggtcttcgagatgttggagcagaacctctatgactttctgaagcaaaacaagtttagccccttgcccctcaaatacattcgcccagttctccagcaggtagccacagccctgatgaaactcaaaagcctaggtcttatccacgctgacctcaaaccagaaaacatcatgctggtggatccatctagacaaccatacagagtcaaggtcatcgactttggttcagccagccacgtctccaaggctgtgtgctccacctacttgcagtccagatattacagggcccctgagatcatccttggtttaccattttgtgaggcaattgacatgtggtccctgggctgtgttattgcagaattgttcctgggttggccgttatatccaggagcttcggagtatgatcagattcggtatatttcacaaacacagggtttgcctgctgaatatttattaagcgccgggacaaagacaactaggtttttcaaccgtgacacggactcaccatatcctttgtggagactgaagacaccagatgaccatgaagcagagacagggattaagtcaaaagaagcaagaaagtacattttcaactgtttagatgatatggcccaggtgaacatgacgacagatttggaagggagcgacatgttggtagaaaaggctgaccggcgggagttcattgacctgttgaagaagatgctgaccattgatgctgacaagagaatcactccaatcgaaaccctgaaccatccctttgtcaccatgacacacttactcgattttccccacagcacacacgtcaaatcatgtttccagaacatggagatctgcaagcgtcgggtgaatatgtatgacacggtgaaccagagcaaaacccctttcatcacgcacgtggcccccagcacgtccaccaacctgaccatgacctttaacaaccagctgaccactgtccacaaccaggctccctcctctaccagtgccactatttccttagccaatcccgaagtctccatactaaactacccatctacactctaccagccctcagcggcatccatggctgcagtggcccagcggagcatgcccctgcagacaggaacagcccagatttgtgcccggcctgacccgttccagcaagctctcatcgtgtgtccccccggcttccaaggcttgcaggcctctccctctaagcacgctggctactcggtgcgaatggaaaatgcagttcccatcgtcactcaagccccaggagctcagcctcttcagatccaaccaggtctgcttgcccagcaggcttggccaagtgggacccagcagatcctgcttcccccagcatggcagcaactgactggagtggccacccacacatcagtgcagcatgccaccgtgattcccgagaccatggcaggcacccagcagctggcggactggagaaatacgcatgctcacggaagccattataatcccatcatgcagcagcctgcactattgaccggtcatgtgacccttccagcagcacagcccttaaatgtgggtgtggcccacgtgatgcggcagcagccaaccagcaccacctcctcccggaagagtaagcagcaccagtcatctgtgagaaatgtctccacctgtgaggtgtcctcctctcaggccatcagctccccacagcgatccaagcgtgtcaaggagaacacacctccccgctgtgccatggtgcacagtagcccggcctgcagcacctcggtcacctgtgggtggggcgacgtggcctccagcaccacccgggaacggcagcggcagacaattgtcattcccgacactcccagccccacggtcagcgtcatcaccatcagcagtgacacggacgaggaggaggaacagaaacacgcccccaccagcactgtctccaagcaaagaaaaaacgtcatcagctgtgtcacagtccacgactccccctactccgactcctccagcaacaccagcccctactccgtgcagcagcgtgctgggcacaacaatgccaatgcctttgacaccaaggggagcctggagaatcactgcacggggaacccccgaaccatcatcgtgccacccctgaaaacccaggccagcgaagtattggtggagtgtgatagcctggtgccagtcaacaccagtcaccactcgtcctcctacaagtccaagtcctccagcaacgtgacctccaccagcggtcactcttcagggagctcatctggagccatcacctaccggcagcagcggccgggcccccacttccagcagcagcagccactcaatctcagccaggctcagcagcacatcaccacggaccgcactgggagccaccgaaggcagcaggcctacatcactcccaccatggcccaggctccgtactccttcccgcacaacagccccagccacggcactgtgcacccgcatctggctgcagccgctgccgctgcccacctccccacccagccccacctctacacctacactgcgccggcggccctgggctccaccggcaccgtggcccacctggtggcctcgcaaggctctgcgcgccacaccgtgcagcacactgcctacccagccagcatcgtccaccaggtccccgtgagcatgggcccccgggtcctgccctcgcccaccatccacccgagtcagtatccagcccaatttgcccaccagacctacatcagcgcctcgccagcctccaccgtctacactggatacccactgagccccgccaaggtcaaccagtacccttacatataaacactggaggggagggagggagggagggagggagagaatggcccgagggaggagggagagaaggagggaggcgctcctgggaccgtgggcgctggccttttatactgaagatgccgcacacaaacaatgcaaacggggcaggggcgggggggggggggggggcagagggcagggggacgggtcgggacaccagtgaaacttgaaccgggaagtgggaggacgtagagcagagaagagaacatttttaaaaggaagggattaaagagggtgggaaatctatggtttttattttaaaaaagaaaaaggaaaaaaaaaaagtcaataacaaaaaacccagctcaagaacccattctacgccaaactggaaaggagaagagagcaacaggaagattccagaaacggggggccccagtttttgaagaactttatgaacttttcaaagattattttcatatggcagcaagtgatacggaagactgctgtcagggacacctgatatggaaatcaaatagatttttaattaattgaacataagatttagggatttttccagaactcgaaagggtcaacagccctccagaatgtcgggctgcagcctgaggaggctgatgtttggagctggtgtgggattggcgaagcccagtccgggctccctagtcaggaaagacgggggacggccaggctgctggaaggcccccgggggcgcggggcgagttttctttttctgagcactctggataaatccctaagcaacgttgtttctcaaatgtcattaataatgtgtgttgcaaactttaggtttttttcttttctgaaaatgtattttctctttgaatccacccctagtcgcgtagcgtagggctagcggtcgtcacagacaccctagtagaatgtagcactcagcacccttgtctcctaccttgtgttcaactccaatgataccaatagaatattcctcaatgtaattgcacaaaaaaaagcgatataacataggcatgtaaccaatgtggcggtgcaggtgtgcgggtgagcgagcacgtgtgggtgtgcacgcgccgccctccccgcgtggccctcggcgccgccaccctagctggcgcagtcttgacactgcatccttccctcctagtgccttaccgagcgacagacgcggcgtgagggtttacttccactggtactccaagaaactgaggctagtcagacacaatctcagctcttctgttgtgctgttgtaacagtttacgctggccttttttttttctttttctttttctttttaaaatgttaatgcccgttgtctttcctgggctgtttgctagcggaaggatgccagggaagccagcaggagctaggagagagtccgtggatctcgaaagaaatatgggagacagatgcccggcgggtgcgtctggagatggggacggcgggagttgagttgtggcagtagttgagttgtaatttgtgggcggaggcccagagagactccccacccttcacccctgccccactctgtccccagttccgccatttgtgaggccagaggtttccggactgttggcctcgccaggcagccgtctcccgccccaggcggcatcccccagtccctcccgcctccacgagagcctggagctctcagcctcgcccggggctccactctctcctccggctccctgggctgttttgctctaacgatcttgccagatccctccctctgtagacaaccaccaacctctgtttgctgttgaattctctcctcacattacccaggtctgctcaagacatgattttggttttggtttctgagggttctagtgggcagaaggttggagggacacttatgagggtggccgggggtctgacgctgcactttggaaaaactcacacagttgaatttccaaagaaatctgccctttgccctctttgcacctttgatacattctggaagttttctcaggctttggacacttctggggatggaggtgtggagaagtggggagttccctctcttcatagtaaataactctgaaatatgtgaatgtgaatggcaggagaatctggccaaggatggggccgaaaagggtggttctaattgtttgcttctgatgttgagtctttagctgaccccacaggcaggtttccaaggtgcaaagagatctttcccgagtcagcggccccatcctcatcctccctccctttacttcctcactgtgcagtctccctcaaggatctactgtgaaaggtgtgtttgtagtgatatccaacctaactcagtaacgaagtcgttacttagctcttagctgtgaaataactctggaaacttccccaccccaaccataaattcttacttataaagaaacaggtccccaaactggaaacagcttagtccaggcctcagcgagaaggaaggacaccatgactgctccatgctgggcacagccgggcagtcttgccaagtgcctgctggaggctgtgccggcaagaggcctgcagcaaggagattcccttccctcgggccattatcaatactgtctttatctggaggtggggaagcgcagccctctgagacagcaggacaatggtcagttcagagagggtgagggcagcaaacgcttcagaggacacagaagccagaggacccccccccgccccacagctgggtcagcctggaaaatccatctattagggactttttggcagccagatggcagcaatagcccattaggtctcatcccgagttccaagtcttggctgcaaatgagcctcagttcgccttactggagagcacccccagattcctgggcacagttcatttccagccctttctagatctgatcttttagggggaaagacagcttaaaatgttcttttcattttaaagaaaattattctgtctgcttaagttggaggctacttactctttcacctgacattttctttccttttattcttccagatcaggaatgaaatttccatgctgctcataaagataatattattgtactaattatttttattaccattgtaattatgatcattatgttgatattttagtcagggttttaaatgcacatttattccaagtatctttgtgttttctctttaatatttaaacttattctctctgtgagtatataagtagactggagggacatccagatgtccagttttgtcaggcaaaaaaaaaaaggaaagacttaggaagtaggaaaattgtttctgtcatctctatcccaacaagagacgtcaagaaagatccaccacagaacaaaagtttaaagaagaatcaaagccttgattgggcttctgacaacatggtcaccatcaaggttgtcattttctagatcccagaggcctgggatgcgacgtcaggtggcatctcatgggctcggggaatgtcgagtcactgactgtccagcccttagccagcttctctcccacatcctcagagctctcctgtgcttctgaaatctgttaactaaatctttggcttgcctctggtatttaagcaagaaaattccctcccagaggtgaccccatccgcttccccacaatccatccttttgccatcggcgcacctggggcgtggcttaggttcttcaatgcagggacatttgccccctcccagaagctgctgggcacagtgaggtggcgtaagagtgactggcaggtggtaccttccccaggaaatttcaccacaccacccagttcctcagcctgccccctccccctgtgatgcatgcccccagcacccaattctagccagctggaagtgggtggagggacagcaggaggccagagaaaccctgaacaaagctgggcggctgctcaggcatcacaggctgcaccccctctgaaagcatccccactgggctccggccacatcttcagtgcactgtgctgtgtgcgctgggtgctcacacgctgtccccagacccacaaagtgctaggccccagttgaagaaaggggtgaaatagccagcttcaccgaagggaagggaagggaagtattgggcgatgccagccccacagacgctcagcaaacattagtgcacattctcctagtcctcacccaatggcctcctctacccccatgcatggagctgccacatcagaagccccaagagaagctccctgcaggagaggccagctccctggatgcccaattgcatacctggccgaatctgccattgagtcaccttagcaaataggctgctgtcactaggaccaagctctcaagcagagggatgccaacctagtccttacttagcccacgaatcatctagagcatcctctagtcttttgtgggctccctccttcccatttgaagagacattgttcagaggaagaggggaagatttgaaatgtcaggtcacggaggagtgtttaactggagcctggtgaaccgcagggcaatttgcttctgctcactgggttctgactggcccgtctggacgtgggcccccatgtctctgtgcttagggcctcttcatgatgttttggatgtttccaagggaagtgggtgagcagatcaaggggtgggagagtcgaggcttgatgccagttaatactgtgaagtggagcgtgcggtcagtggaattcagaggaaaaagaagggttggagcaaagcggcattcatctcctggactgttagcctttctagtcttcctggtggctgaggtgttcacgggctgggggagccagctgacctttgtcctcttcaacctagaagactcagcccgcccagacaccaacgtgtgagacggatggacatcaggaagggaaggggagattagcccaactgctgacagaacgatttcccttggttggaccttgggaatggcaaacactcatattggaacaagcttggggtggaagatttaggccgtgtgagcatgtgtgagtgagtggaacaaactttcttggaaactggagggaggagatgaggaggcttcgggaagtattactgatggctcatggttgagagagcgacgtggggacccagctcgccccagcttttgtcccaggttctctttgtctgatgctgagggcagggtggggtgtgggaccaccactcttgttggcctgtcaagtagaccctaggacagaaaatggaaagaaggaaatggctcggtgctctcaactagcagagagaattgaggagaggtaagggttccttctgcaggccagcctgggactccacagcgccagcaggagtgacttggccacaagacattccagccccagggactttgcaggcttcattccctgtctgtgtcttttccttctggtgtgttttacagacttctgatggggaagcttcaaacttgagcaggccagagatgtccttaccaaattggaaaggaaggtgaaactgttcctttctttagccaaagaacccttctcaaagacgcctccagaaatggacaaaatggccttcccttcgttcctttccaggcaataatgacatcattagtgatgcaattctatttgtctttctctttcctctctgtccttttttttaaaaaaaaaaaatgcatttatttcaaaactgtgctattcttttaagaggagtggaggtgaccccttcgatgctgctgctatcgggagacaaggtgccataccaatacgtgggcttgactaatcccaggccaccatgggagagagcaaagcagggctgccaggagttcagttgcatcaagggcgtagagcacgcgggggctgggctcggaatagcagtacttttccactttgatgccttagaactctcacttctcatctccacagaccagactcagtaaaatctcaggccactagagaatggaaggcggtgaaacaggatttaaatgcaaaaaaaacctattggaggcttttggcaccgtggctcactagagggacccagcatagtagaggtttctcttgttgcagcttctgaaaagttcaaaaaagaactccaggccgttcttccctcaaacccagtgagagtttgcagagaagtgccccctgcagggctcccgtcccagaacaccagcaccagagagggtcttcccgatgccccccgctggacttgcccaagcctctgggagcccctcatctcagatccctgtgttgaacatgacactgactgtcccttatttgttaaaatttgcaatatctctcaagtaaataatagccaacatttgttgaatgctttcatgactcccgggctaaggcctttatgagcgttgtctcaaggggccccaacagccatcccacagggagggggataacagcccccatttatagataagggagctgaccggatgctctgagaagtggcaggtgttgaaggaaggataaagcagtgatgggccagaatccccaaggttcccttttttgttcatcaggcccttcctgagatgtgatttttaatcttttaactttttttaattaatagcaatgcgtggcctcatatttctatgaaccatttagtgatactcccgcttcctgcatgccacacactgtgctgggaattgctcatgggttgtcctgtttcatcttctccgtagccctgtgagatcggcaatattagtccccctacagccaaggaaactgcccagagccacacaactcttgaggggcgaggagggcttgaacctgagtctgcccagctccagaactgagcttgcagccattagccacagctgtctcctgcatgtctgagcaaagaaaggcctttacacagcatcaccctgtgccatcccatgcaccgtgggactcagctaaaggactgtgcaaagagggggctcctgagttggatttaggcaaaaggggcagaattcgtttgatttttagagaaaatctctggagagtttcttttgattcatagaattccttttagatttctttccagcataccaactagctttagtagtgctgctacaaccagctcttataagtaagagtgaaaaagtattcttttcttctttaaaaaataagtttttcttgcttatagttaattctagaaaggcaatactaaaggtatatatttttttcaaaatgctattttttactgcacttgataattatcctgacagctctgatctctgtaatagattcactcttcagctctgggcagaaccagaggcagggttcacaccaaatttgtaaataccatatgtgggtctggtgtccaggaacttttttctttctgttaaaaaaaagaaaaaaaaaagaaaaaaaaaaagaagtagaggtggaagaaagacaagacttagaggaacaaaagaatgttttcttttgagatactcttctcaaagaaatagcaacaattgtataaacaggaaaaccagccagctttcatgataaaaggaaggcgtgtctcttgccctggtatgagattaacagaaatacagatgcatttttattttgattgaaagatggtgagaatgtagaaatgcttaggactagatttttaattttttaaaataactattatcatttattatgaaatatttgttcagttgttttgagtgggtttcttgttccttttttcatttaaaaccttctttgttgactggctccaggcttgtttgcctaaattcttaggtagtttacacaagttctagaatcttttagaactttaactccattggaagcaaacctaactaatcggagtttgagatcctggttggtttcaataggtattctggaattctggcagaacacctaaagattttttttttttttagaaggttttagatacattatcttacacaaactgtgacctaatggcaataattacctcaaatgtgggcattcatcctggttttagccttttttgaaatcatgtagccagcttgatcttggaatttaaagactatgaattctctgtgggctgaaaataatgattacttcatacccccggtcatcgttgcttaagtgaattctgaaaatagctcatctttacaacaaaaattaaaccaaggaagagattattctttgtgtgttgtactcaaatgcgatgttcaaatgcacatgttaagtatatatgtttttagctactgtaaaatgctgttagccttctaagctatcaaaacagtcacattttaaatgagtaaactaaacaattgactgtggatacttaagcatatttctggctacgttttatagttaaagtgttttatagtttacatttagactggtactttttaaagaaaagttctgtttataactgacatccgcaaaccccagtgaatgcctcttagttggaggttgtgtctcccccaaggcaagtgtgttgtcccagactcttctgtagtccagcatgcgcacttccctctggattattactttccacgtgaactcaagagaacatgaaaggcaatccagatggagggaaaaggtgtgagtccgcagcccgggccagatgcgaaggtctcatgcgtgtcgtctaaacacttgtcttcaaggccttctctctgacatcttggaagagtcattgagaacagataacctggttcattgatttttgtcttgatttgaatatttaacttattaatagatccactgatttccaggcaccaggcagtagaagagactgggattcaggtgaccatgaaggcacagctgctacttctgggccgggggtgatattttgatcagcgttttgtaggggaggaccatatacccctattcccatggtcgctggctgggttttccatatatctgctgtcatttattcgttttccccttaaaagcaaaatcaatgtaaaaggctatgtttacgttttactcattgtccagcttagactcaaagtctagttcggtgggagggggaccttagcatcctctcagagatggtcagggctgagcaggaggaggcagagacagaggggcagctcagcctggtccattgagacccactctaaacagacatcatatttggaacaagaagatgcttcgagacaggaatgggccccactgtcatgcagaaacagactgggggaatggcagtttccctgagtcttggtttcttttatgttttctcttgtgccaccaccaaactgcagaggacctgctgtgacctaaagggcattcctttagcagataagaccttgaaaactgcaaaacacctgggaccagggagcttttaaaaaatacaaaaaaataccacatttgctttttccctgtgaactgtattgacagcgtgttcttaggacagtcttttggtggaaatgttactgtaaaatagttttcatctcacccctcctaatcatactcccactttcctgtttgtgtggtggtgttgctgttttttcctttacatgaattaaccaaatgaattttgtgtcattgtttttggggcttatatttttaaaacatagaaattgccttttgttcatttgaaaagtaagtatgttgtatctgaaaaagggctctgcctctgctctccctcgcttccttgtaaccaatctccaaacgaatctctcctggcaccgcccccttccttatatagggtcactgtccccggggccacctctgcctccaccctgctgtcaccactgccctgggccaaggcacccaggactcccagaaagcgcgagagccagcaagaaggccccactcagccttgagactggtggtcacacctccctgtcagagtcgcctgctgggctgaaggggcaatggattgtcattgttgaaattgtttggctcaggttataaggaggaacttgggaagtagaaagtgacttgaccatgtgcatccttggtagcttcctgtaactaacaaatggaacagagagcacacccccgccccgccccaccccaagcagatgttcccgtcagcgctgccctgagtcagtcggtcccccgtttctgctctcctcccttttgtgttcctgctcacttcaagcttcttccatggactttccagggcacagtcatctctagcccccaaatcatctcttcatcctctgtgtgtgcatttttttaaccaaatgaaatagacaagaaagtcatactttggggcagcagaatttctaatttagtagaatcactgtatagagatagatgttgatatatatgtttgtgtatatatatcaaaccaaattggataggagaagtatagctttacagatgaggagaaggagctctttagaggtcggagtcaagactggtgtcttggacgtgcatgggctgtgtcccaggccactccgcacacatggggctgaggcgtggcgccgggcccttgtcatccacctcaccacggcagagccagcaggccctgtagggtgctgctgctgtctcactgggtcccagcttcaagcgcatcagtgggtgacgggggcaacaaatcagagtgactggaagtttccatcccgttttgctttgaccacgtgtactgagctgcagcctctgatactctgtcacgtttccaaaaatggtatccattaggatagaaagagaatggatctgcagaaatgtttacctttcaactgctcatgaattcaggacactggatagaaagactcactccccaaaatgagaacagggaagaggagacccggcgacactaagtcaccaggtccaaggaacgtggctccctccccagggtcatctcacctagatctttctctcccaggtcatctcagctcaatctcaataaccctatgaaagccctggtctgttgtgttccttcaccgtacggtttctgtaataaaaagtgttaatccatgttaatctgtgtgaaaattattgcgtgcaacagtattttctcgtgtacctctttttcctatgtgaattgtccctcttttttatttataaatgtctacttttgtttttttaaagacaaaccaatgtgttgtagacctatatgtaacctattccttagtctcatattataggtatgttataagaatggatattttacttggctttagaatgttttacaagaaaactaattcttaactgatcaagtccttgctactaaaatgcttgtgtttttcatcatgacgtcgtgtgcttctaaattaatcattttcgttgtagaaaaatggagtgaatttatattagtcttggaaactaataatagcattgtaaatttatgagatgattttaacagaaaaaatatagaagaatatagttattttaattgtaatattactaactgtagggtgagaaaaaggggggggggtcccattgtggtgaactatgttatagcttgttactcatagtttctttttgatcattttttcggtctccgaggtgaaatgacttattaattaaaatttgtaaactcacatatgcatattgtatatgtgtagaaatgtaatcacactttgtcttggaattacattaaactgtttgaaatcactgtaaaaaaaaaaaaaaaaaaaaa

SEQ ID NO: 841 - protein, 1198 aa, Homo Sapiens
MAPVYEGMASHVQVFSPHTLQSSAFCSVKKLKIEPSSNWDMTGYGSHSKVYSQSKNIPLSQPATTTVSTSLPVPNPSLPYEQTIVFPGSTGHIVVTSASSTSVTGQVLGGPHNLMRRSTVSLLDTYQKCGLKRKSEEIENTSSVQIIEEHPPMIQNNASGATVATATTSTATSKNSGSNSEGDYQLVQHEVLCSMTNTYEVLEFLGRGTFGQVVKCWKRGTNEIVAIKILKNHPSYARQGQIEVSILARLSTESADDYNFVRAYECFQHKNHTCLVFEMLEQNLYDFLKQNKFSPLPLKYIRPVLQQVATALMKLKSLGLIHADLKPENIMLVDPSRQPYRVKVIDFGSASHVSKAVCSTYLQSRYYRAPEIILGLPFCEAIDMWSLGCVIAELFLGWPLYPGASEYDQIRYISQTQGLPAEYLLSAGTKTTRFFNRDTDSPYPLWRLKTPDDHEAETGIKSKEARKYIFNCLDDMAQVNMTTDLEGSDMLVEKADRREFIDLLKKMLTIDADKRITPIETLNHPFVTMTHLLDFPHSTHVKSCFQNMEICKRRVNMYDTVNQSKTPFITHVAPSTSTNLTMTFNNQLTTVHNQAPSSTSATISLANPEVSILNYPSTLYQPSAASMAAVAQRSMPLQTGTAQICARPDPFQQALIVCPPGFQGLQASPSKHAGYSVRMENAVPIVTQAPGAQPLQIQPGLLAQQAWPSGTQQILLPPAWQQLTGVATHTSVQHATVIPETMAGTQQLADWRNTHAHGSHYNPIMQQPALLTGHVTLPAAQPLNVGVAHVMRQQPTSTTSSRKSKQHQSSVRNVSTCEVSSSQAISSPQRSKRVKENTPPRCAMVHSSPACSTSVTCGWGDVASSTTRERQRQTIVIPDTPSPTVSVITISSDTDEEEEQKHAPTSTVSKQRKNVISCVTVHDSPYSDSSSNTSPYSVQQRAGHNNANAFDTKGSLENHCTGNPRTIIVPPLKTQASEVLVECDSLVPVNTSHHSSSYKSKSSSNVTSTSGHSSGSSSGAITYRQQRPGPHFQQQQPLNLSQAQQHITTDRTGSHRRQQAYITPTMAQAPYSFPHNSPSHGTVHPHLAAAAAAAHLPTQPHLYTYTAPAALGSTGTVAHLVASQGSARHTVQHTAYPASIVHQVPVSMGPRVLPSPTIHPSQYPAQFAHQTYISASPASTVYTGYPLSPAKVNQYPYI

SEQ ID NO: 842 - DNA, 1865 bp, Homo Sapiens
ggtgtctctggccgctgcgctccaccccagcccgccatggcgtcaggcgccgcggccccggggaggtggctcccactttaagaagtgaagttttgcgcccctccccctccctgcccacctcctgcagcctcctgcgccccgccgagctggcggatggagctgcgcagcgggagcgtgggcagccaggcggtggcgcggaggatggatggggacagccgagatggcggcggcggcaaggacgccaccgggtcggaggactacgagaacctgccgactagcgcctccgtgtccacccacatgacagcaggagcgatggccgggatcctggagcactcggtcatgtacccggtggactcggtgaagacacgaatgcagagtttgagtccagatcccaaagcccagtacacaagtatctacggagccctcaagaaaatcatgcggaccgaaggcttctggaggcccttgcgaggcgtcaacgtcatgatcatgggtgcagggccggcccatgccatgtattttgcctgctatgaaaacatgaaaaggactttaaatgacgttttccaccaccaaggaaacagccacctagccaacgggatagctgggagtatggccaccctgctccacgatgcggtaatgaatccagcagaagtggtgaagcagcgcttgcagatgtacaactcgcagcaccggtcagcaatcagctgcatccggacggtgtggaggaccgaggggttgggggccttctaccggagctacaccacgcagctgaccatgaacatccccttccagtccatccacttcatcacctatgagttcctgcaggagcaggtcaacccccaccggacctacaacccgcagtcccacatcatctcaggcgggctggccggggccctcgccgcggccgccacgacccccctggacgtctgtaagacccttctgaacactcaggagaacgtggccctctcgctggccaacatcagcggccggctgtcgggtatggccaatgccttccggacggtgtaccagctcaacggcctggccggctacttcaaaggcatccaggcgcgtgtcatctaccagatgccctccaccgccatttcttggtctgtctatgagttcttcaagtactttctcaccaagcgccagctggaaaatcgagctccatactaaaggaagggatcatagaatcttttcttaaagtcattctctgcctgcatccagccccttgccctctcctcacacgtagatcattttttttttgcagggtgctgcctatgggccctctgctccccaatgccttagagagaggaggggacggcacggccgctcaccggaaggctgtgtgcggggacatccgaggtggtggtggacaggaaggacttgggaaggggagcgagaaattgctttttctcttcctccctgggcagaatgtagcttttctgcttcactgtggcagcctcctccctggatccttagatcccagaggagggaagaaaatttgcagtgactgaaaacagtaaaaaaaaaaaaaaaaaaaaaaaaaaaaaaaaaaaaaaaaaaaaatttatgtatataaaagttgcattacacagtacaaaatagatggataatgtttatcctttatttttctatgtagaagtttttgaatttgtgtgtgtgcttgtgcgtgtctacacctagtattacggctgggactctccagctgtttttgttgttgttatgtttttaagagggttgaattcttccatcaggtgaacgaaaaaggcaacaaagtaataaatcagtgaatgtggccggcagctgtgtttagcccctccagatggaagtttcacttgaatgtaaaataataaagtttatattttgaa

SEQ ID NO: 843 - protein, 338 aa, Homo Sapiens
MELRSGSVGSQAVARRMDGDSRDGGGGKDATGSEDYENLPTSASVSTHMTAGAMAGILEHSVMYPVDSVKTRMQSLSPDPKAQYTSIYGALKKIMRTEGFWRPLRGVNVMIMGAGPAHAMYFACYENMKRTLNDVFHHQGNSHLANGIAGSMATLLHDAVMNPAEVVKQRLQMYNSQHRSAISCIRTVWRTEGLGAFYRSYTTQLTMNIPFQSIHFITYEFLQEQVNPHRTYNPQSHIISGGLAGALAAAATTPLDVCKTLLNTQENVALSLANISGRLSGMANAFRTVYQLNGLAGYFKGIQARVIYQMPSTAISWSVYEFFKYFLTKRQLENRAPY

SEQ ID NO: 844 - DNA, 7556 bp, Homo Sapiens
gcaggcgccttcgcggaccgagcctgacggagccggaggctgggagccgcggcggcctggggaagtgtttggattgtgagctatttcagaactgttctcaggactcattattttaacatttgggagaaacacagccagaagatgcacacttgactgaaggaggacagggaatctgaagactccggatgacatcagagctacttttcaacagccttctcaattttctttctcagaaagcagaggctcagagcttggagacagacgaacactgatatttgcatttaatggggaacaaaagatgaagaaggaaaaggaatatattcactaaggattctatctgcttactgctacagacctatgtgttaaggaattcttctcctcctccttgcgtagaagttgatcagcactgtggtcagactgcatttatcttgtcattgccagaagaaatcttggacagaatgtaacagtacgtctctctctgattgcgatggaaggtgataaactgatactcctttattaaagttacatcgcactcaccacagaaaaccattctttaaagtgaatagaaaccaagcccttgtgaacacttctattgaacatgactcatggagaagagcttggctctgatgtgcaccaggattctattgttttaacttacctagaaggattactaatgcatcaggcagcagggggatcaggtactgccgttgacaaaaagtctgctgggcataatgaagaggatcagaactttaacatttctggcagtgcatttcccacctgtcaaagtaatggtccagttctcaatacacatacatatcaggggtctggcatgctgcacctcaaaaaagccagactgttgcagtcttctgaggactggaatgcagcaaagcggaagaggctgtctgattctatcatgaatttaaacgtaaagaaggaagctttgctagctggcatggttgacagtgtgcctaaaggcaaacaggatagcacattactggcctctttgcttcagtcattcagctctaggctgcagactgttgctctgtcacaacaaatcaggcagagcctcaaggagcaaggatatgccctcagtcatgattctttaaaagtggagaaggatttaaggtgctatggtgttgcatcaagtcacttaaaaactttgttgaagaaaagtaaagttaaagatcaaaagcctgatacgaatcttcctgatgtgactaaaaacctcatcagagataggtttgcagagtctcctcatcatgttggacaaagtggaacaaaggtcatgagtgaaccgttgtcatgtgctgcaagattacaggctgttgcaagcatggtggaaaaaagggctagtcctgccacctcacctaaacctagtgttgcttgtagccagttagcattacttctgtcaagcgaagcccatttgcagcagtattctcgagaacacgctttaaaaacgcaaaatgcaaatcaagcagcaagtgaaagacttgctgctatggccagattgcaagaaaatggccagaaggatgttggcagttaccagctcccaaaaggaatgtcaagccatcttaatggtcaggcaagaacatcatcaagcaaactgatggctagcaaaagtagtgctacagtgtttcaaaatccaatgggtatcattccttcttcccctaaaaatgcaggttataagaactcactggaaagaaacaatataaaacaagctgctaacaatagtttgcttttacatcttcttaaaagccagactatacctaagccaatgaatggacacagtcacagtgagagaggaagcatttttgaggaaagtagtacacctacaactattgatgaatattcagataacaatcctagttttacagatgacagcagtggtgatgaaagttcttattccaactgtgttcccatagacttgtcttgcaaacaccgaactgaaaaatcagaatctgaccaacctgtttccctggataacttcactcaatccttgctaaacacttgggatccaaaagtcccagatgtagatatcaaagaagatcaagatacctcaaagaattctaagctaaactcacaccagaaagtaacacttcttcaattgctacttggccataagaatgaagaaaatgtagaaaaaaacaccagccctcagggagtacacaatgatgtgagcaagttcaatacacaaaattatgcaaggacttctgtgatagaaagccccagtacaaatcggactactccagtgagcactccacctttacttacatcaagcaaagcagggtctcccatcaatctctctcaacactctctggtcatcaaatggaattccccaccatatgtctgcagtactcagtctgaaaagctaacaaatactgcatctaaccactcaatggaccttacaaaaagcaaagacccaccaggagagaaaccagcccaaaatgaaggtgcacagaactctgcaacgtttagtgccagtaagctgttacaaaatttagcacaatgtggaatgcagtcatccatgtcagtggaagagcagagacccagcaaacagctgttaactggaaacacagataaaccgataggtatgattgatagattaaatagccctttgctctcaaataaaacaaatgcagttgaagaaaataaagcatttagtagtcaaccaacaggtcctgaaccagggctttctggttctgaaatagaaaatctgcttgaaagacgtactgtcctccagttgctcctggggaaccccaacaaagggaagagtgaaaaaaaagagaaaactcccttaagagatgaaagtactcaggaacactcagagagagctttaagtgaacaaatactgatggtgaaaataaaatctgagccttgtgatgacttacaaattcctaacacaaatgtgcacttgagccatgatgctaagagtgccccattcttgggtatggctcctgctgtgcagagaagcgcacctgccttaccagtgtccgaagactttaaatcggagcctgtttcacctcaggatttttctttctccaagaatggtctgctaagtcgattgctaagacaaaatcaagatagttacctggcagatgattcagacaggagtcacagaaataatgaaatggcacttctagaatcaaagaatctttgcatggtccctaagaaaaggaagctttatactgagccattagaaaatccatttaaaaagatgaaaaacaacattgttgatgctgcaaacaatcacagtgccccagaagtactgtatgggtccttgcttaaccaggaagagctgaaatttagcagaaatgatcttgaatttaaatatcctgctggtcatggctcagccagcgaaagtgaacacaggagttgggccagagagagcaaaagctttaatgttctgaaacagctgcttctctcagaaaactgtgtgcgagatttgtccccgcacagaagtaactctgtggctgacagtaaaaagaaaggacacaaaaataatgtgaccaacagcaaacctgaatttagcatttcttctttaaatggactgatgtacagttccactcagcccagcagttgcatggataacaggacattttcatacccaggtgtagtaaaaactcctgtgagtcctactttccctgagcacttgggctgtgcagggtctagaccagaatctgggcttttgaatgggtgttccatgcccagtgagaaaggacccattaagtgggttatcactgatgcggagaagaatgagtatgaaaaagactctccaagattgaccaaaaccaacccaatactatattacatgcttcaaaaaggaggcaattctgttaccagtcgagaaacacaagacaaggacatttggagggaggcttcatctgctgaaagtgtctcacaggtcacagccaaagaagagttacttcctactgcagaaacgaaagcttctttctttaatttaagaagcccttacaatagccatatgggaaataatgcttctcgcccacacagcgcaaatggagaagtttatggacttctgggaagcgtgctaacgataaagaaagaatcagaataaaatgtacctgccatccagttttggatctttttaaaactaatgagtatgaacttgagatctgtataaataagagcatgatttgaaaaaaagcatggtataattgaaacttttttcattttgaaaagtattggttactggtgatgttgaaatatgcatactaatttttgcttaacattagatgtcatgaggaaactactgaactagcaattggttgtttaacacttctgtatgcatcagataacaactgtgagtagcctatgaatgaaattcttttataaatattaggcataaattaaaatgtaaaactccattcatagtggattaatgcattttgctgcctttattagggtactttattttgcttttcagaagtcagcctacataacacatttttaaagtctaaactgttaaacaactctttaaaggataattatccaataaaaaaaaacctagtgctgattcacagcttattatccaattcaaaaataaattagaaaaatatatgcttacatttttcacttttgctaaaaagaaaaaaaaaaggtgtttatttttaactcttggaagaggttttgtggttcccaatgtgtctgtcccaccctgatccttttcaatatatatttctttaaaccttgtgctacttagtaaaaattgattacaattgagggaagtttgatagatcctttaaaaaaaaggcagatttccattttttgtattttaactactttactaaattaatactcctccttttacagaattagaaaagttaacatttatctttaggtggtttcctgaaaagttgaatatttaagaaattgtttttaacagaagcaaaatggcttttctttggacagttttcaccatctcttgtaaaagttaattctcaccattcctgtggtacctgcgagtgttatgaccaggattccttaaacctgaactcagaccacttgcattagaaccatctggagcacttgttttaaaatgcagattcataggcagcatctcagatctacagaacaagaatctctgctaagtggacctggaatcttccatctgcatcttaacatgctctctaggtgtttcttgtgtttgagaaccatgacttatgactttcctcagaacatgagactgtaaaacaaaaacaaaaaactatgtgatgcctctattttccccaatacagtcacacatcagctcaaaatttgcaatattgtagttcatatattaccgttatgtctttggaaatcgggttcagaacactttttatgacaaaaattgggtggaggggataactttcatatctggctcaacatctcaggaaaatctgtgattatttgtgtgttctaatgagtaacatctacttagttagccttagggatggaaaaacagggccacttaccaaactcaggtgattccaggatggtttggaaacttctcctgaatgcatccttaacctttattaaaaccattgtcctaagaacaatgccaacaaagcttacaacatttagtttaaacccaagaagggcactaaactcagattgactaaataaaaagtacaaagggcacatatacgtgacagaattgtacacaatcactccattggatcttttactttaaagtagtgatgaaaagtacatgttgatactgtcttagaagaaattaatatattagtgaagccacatggggtttcagttgcgaaacaggtctgtttttatgttcagtttgtacaatccacaattcattcaccagatattttgttcttaattgtgaaccaggttagcaaatgacctatcaaaaattattctataatcactactagttaggatattgatttaaaattgttctacttgaagtggtttctaagatttttatattaaaaataggtgtgatttcctaatatgatctaaaaccctaaatggttatttttcctcagaatgatttgtaaatagctactggaaatattatacagtaataggagtgggtattatgcaacatcatggagaagtgaaggcataggcttattctgacataaaattccactggccagttgaatatattctattccatgtccatactatgacaatcttattgtcaacactatataaataagcttttaaacaagtcatttttcttgatcgttgtggaaggtttggagccttagaggtatgtcagaaaaaatatgttggtattctcccttgggtagggggaaatgacctttttacaagagagtgaaatttaggtcagggaaaagaccaagggccagcattgctacttttgtgtgtgtgtgtgtgggttttgttttgtttttttggttggctggttgttttcgttgttgttaacaaaggaatgagaatatgtaatacttaaataaacatgaccacgaagaatgctgttctgatttactagagaatgttcccaatttgaatttagggtgattttaaagaacagtgagaaagggcatacatccacagattcactttgtttatgcatatgtagatacaaggatgcacatatacacattttcaaggactattttagatatctagacaatttcttctaataaagtcatttgtgaaagggtactacagcttattgacatcagtaaggtagcattcattacctgtttattctctgctgcatcttacagaagagtaaactggtgagagtatatattttatatatatatatatatatatatatataatatgtatatatatatatattgacttgttacatgaagatgttaaaatcggtttttaaaggtgatgtaaatagtgatttccttaatgaaaaatacatattttgtattgttctaatgcaacagaaaagccttttaatctctttggttcctgtatattccatgtataagtgtaaatataatcagacaggtttaaaagttgtgcatgtatgtatacagttgcaagtctggacaaatgtatagaataaaccttttatttaagttgtgattacctgctgcatgaaaagtgcatgggggaccctgtgcatctgtgcatttggcaaaatgtcttaacaaatcagatcagatgttcatcctaacatgacagtattccatttctggacatgacgtctgtggtttaagctttgtgaaagaatgtgctttgattcgaagggtcttaaagaatttttttaatcgtcaaccacttttaaacataaagaattcacacaactactttcatgaattttttaatcccattgcaaacattattccaagagtatcccagtattagcaatactggaatataggcacattaccattcatagtaagaattctggtgtttacacaaccaaatttgatgcgatctgctcagtaatataatttgccatttttattagaaatttaatttcttcatgtgatgtcatgaaactgtacatactgcagtgtgaatttttttgttttgttttttaatcttttagtgtttacttcctgcagtgaatttgaataaatgagaaaaaatgcattgtc

SEQ ID NO: 845 - protein, 1158 aa, Homo Sapiens
MTHGEELGSDVHQDSIVLTYLEGLLMHQAAGGSGTAVDKKSAGHNEEDQNFNISGSAFPTCQSNGPVLNTHTYQGSGMLHLKKARLLQSSEDWNAAKRKRLSDSIMNLNVKKEALLAGMVDSVPKGKQDSTLLASLLQSFSSRLQTVALSQQIRQSLKEQGYALSHDSLKVEKDLRCYGVASSHLKTLLKKSKVKDQKPDTNLPDVTKNLIRDRFAESPHHVGQSGTKVMSEPLSCAARLQAVASMVEKRASPATSPKPSVACSQLALLLSSEAHLQQYSREHALKTQNANQAASERLAAMARLQENGQKDVGSYQLPKGMSSHLNGQARTSSSKLMASKSSATVFQNPMGIIPSSPKNAGYKNSLERNNIKQAANNSLLLHLLKSQTIPKPMNGHSHSERGSIFEESSTPTTIDEYSDNNPSFTDDSSGDESSYSNCVPIDLSCKHRTEKSESDQPVSLDNFTQSLLNTWDPKVPDVDIKEDQDTSKNSKLNSHQKVTLLQLLLGHKNEENVEKNTSPQGVHNDVSKFNTQNYARTSVIESPSTNRTTPVSTPPLLTSSKAGSPINLSQHSLVIKWNSPPYVCSTQSEKLTNTASNHSMDLTKSKDPPGEKPAQNEGAQNSATFSASKLLQNLAQCGMQSSMSVEEQRPSKQLLTGNTDKPIGMIDRLNSPLLSNKTNAVEENKAFSSQPTGPEPGLSGSEIENLLERRTVLQLLLGNPNKGKSEKKEKTPLRDESTQEHSERALSEQILMVKIKSEPCDDLQIPNTNVHLSHDAKSAPFLGMAPAVQRSAPALPVSEDFKSEPVSPQDFSFSKNGLLSRLLRQNQDSYLADDSDRSHRNNEMALLESKNLCMVPKKRKLYTEPLENPFKKMKNNIVDAANNHSAPEVLYGSLLNQEELKFSRNDLEFKYPAGHGSASESEHRSWARESKSFNVLKQLLLSENCVRDLSPHRSNSVADSKKKGHKNNVTNSKPEFSISSLNGLMYSSTQPSSCMDNRTFSYPGVVKTPVSPTFPEHLGCAGSRPESGLLNGCSMPSEKGPIKWVITDAEKNEYEKDSPRLTKTNPILYYMLQKGGNSVTSRETQDKDIWREASSAESVSQVTAKEELLPTAETKASFFNLRSPYNSHMGNNASRPHSANGEVYGLLGSVLTIKKESE

SEQ ID NO: 846 - DNA, 3265 bp, Homo Sapiens; identical to SEQ ID NO: 806

SEQ ID NO: 847 - protein, 854 aa, Homo Sapiens; identical to SEQ ID NO: 807

SEQ ID NO: 848 - DNA, 4704 bp, Homo Sapiens
ggagagggagaaggctctcgggcggagagaggtcctgcccagctgttggcgaggagtttcctgtttcccccgcagcgctgagttgaagttgagtgagtcactcgcgcgcacggagcgacgacacccccgcgcgtgcacccgctcgggacaggagccggactcctgtgcagcttccctcggccgccgggggcctccccgcgcctcgccggcctccaggccccctcctggctggcgagcgggcgccacatctggcccgcacatctgcgctgccggcccggcgcggggtccggagagggcgcggcgcggaggcgcagccaggggtccgggaaggcgccgtccgctgcgctgggggctcggtctatgacgagcagcggggtctgccatgggtcgggggctgctcaggggcctgtggccgctgcacatcgtcctgtggacgcgtatcgccagcacgatcccaccgcacgttcagaagtcggatgtggaaatggaggcccagaaagatgaaatcatctgccccagctgtaataggactgcccatccactgagacatattaataacgacatgatagtcactgacaacaacggtgcagtcaagtttccacaactgtgtaaattttgtgatgtgagattttccacctgtgacaaccagaaatcctgcatgagcaactgcagcatcacctccatctgtgagaagccacaggaagtctgtgtggctgtatggagaaagaatgacgagaacataacactagagacagtttgccatgaccccaagctcccctaccatgactttattctggaagatgctgcttctccaaagtgcattatgaaggaaaaaaaaaagcctggtgagactttcttcatgtgttcctgtagctctgatgagtgcaatgacaacatcatcttctcagaagaatataacaccagcaatcctgacttgttgctagtcatatttcaagtgacaggcatcagcctcctgccaccactgggagttgccatatctgtcatcatcatcttctactgctaccgcgttaaccggcagcagaagctgagttcaacctgggaaaccggcaagacgcggaagctcatggagttcagcgagcactgtgccatcatcctggaagatgaccgctctgacatcagctccacgtgtgccaacaacatcaaccacaacacagagctgctgcccattgagctggacaccctggtggggaaaggtcgctttgctgaggtctataaggccaagctgaagcagaacacttcagagcagtttgagacagtggcagtcaagatctttccctatgaggagtatgcctcttggaagacagagaaggacatcttctcagacatcaatctgaagcatgagaacatactccagttcctgacggctgaggagcggaagacggagttggggaaacaatactggctgatcaccgccttccacgccaagggcaacctacaggagtacctgacgcggcatgtcatcagctgggaggacctgcgcaagctgggcagctccctcgcccgggggattgctcacctccacagtgatcacactccatgtgggaggcccaagatgcccatcgtgcacagggacctcaagagctccaatatcctcgtgaagaacgacctaacctgctgcctgtgtgactttgggctttccctgcgtctggaccctactctgtctgtggatgacctggctaacagtgggcaggtgggaactgcaagatacatggctccagaagtcctagaatccaggatgaatttggagaatgttgagtccttcaagcagaccgatgtctactccatggctctggtgctctgggaaatgacatctcgctgtaatgcagtgggagaagtaaaagattatgagcctccatttggttccaaggtgcgggagcacccctgtgtcgaaagcatgaaggacaacgtgttgagagatcgagggcgaccagaaattcccagcttctggctcaaccaccagggcatccagatggtgtgtgagacgttgactgagtgctgggaccacgacccagaggcccgtctcacagcccagtgtgtggcagaacgcttcagtgagctggagcatctggacaggctctcggggaggagctgctcggaggagaagattcctgaagacggctccctaaacactaccaaatagctcttctggggcaggctgggccatgtccaaagaggctgcccctctcaccaaagaacagaggcagcaggaagctgcccctgaactgatgcttcctggaaaaccaagggggtcactcccctccctgtaagctgtggggataagcagaaacaacagcagcagggagtgggtgacatagagcattctatgcctttgacattgtcataggataagctgtgttagcacttcctcaggaaatgagattgatttttacaatagccaataacatttgcactttattaatgcctgtatataaatatgaatagctatgttttatatatatatatatatatctatatatgtctatagctctatatatatagccataccttgaaaagagacaaggaaaaacatcaaatattcccaggaaattggttttattggagaactccagaaccaagcagagaaggaagggacccatgacagcattagcatttgacaatcacacatgcagtggttctctgactgtaaaacagtgaactttgcatgaggaaagaggctccatgtctcacagccagctatgaccacattgcacttgcttttgcaaaataatcattccctgcctagcacttctcttctggccatggaactaagtacagtggcactgtttgaggaccagtgttcccggggttcctgtgtgcccttatttctcctggacttttcatttaagctccaagccccaaatctggggggctagtttagaaactctccctcaacctagtttagaaactctaccccatctttaataccttgaatgttttgaaccccactttttaccttcatgggttgcagaaaaatcagaacagatgtccccatccatgcgattgccccaccatctactaatgaaaaattgttctttttttcatctttcccctgcacttatgttactattctctgctcccagccttcatccttttctaaaaaggagcaaattctcactctaggctttatcgtgtttactttttcattacacttgacttgattttctagttttctatacaaacaccaatgggttccatctttctgggctcctgattgctcaagcacagtttggcctgatgaagaggatttcaactacacaatactatcattgtcaggactatgacctcaggcactctaaacatatgttttgtttggtcagcacagcgtttcaaaaagtgaagccactttataaatatttggagattttgcaggaaaatctggatccccaggtaaggatagcagatggttttcagttatctccagtccacgttcacaaaatgtgaaggtgtggagacacttacaaagctgcctcacttctcactgtaaacattagctctttccactgcctacctggaccccagtctaggaattaaatctgcacctaaccaaggtcccttgtaagaaatgtccattcaagcagtcattctctgggtatataatatgattttgactaccttatctggtgttaagatttgaagttggccttttattggactaaaggggaactcctttaagggtctcagttagcccaagtttcttttgcttatatgttaatagttttaccctctgcattggagagaggagtgctttactccaagaagctttcctcatggttaccgttctctccatcatgccagccttctcaacctttgcagaaattactagagaggatttgaatgtgggacacaaaggtcccatttgcagttagaaaatttgtgtccacaaggacaagaacaaagtatgagctttaaaactccataggaaacttgttaatcaacaaagaagtgttaatgctgcaagtaatctcttttttaaaactttttgaagctacttattttcagccaaataggaatattagagagggactggtagtgagaatatcagctctgtttggatggtggaaggtctcattttattgagatttttaagatacatgcaaaggtttggaaatagaacctctaggcaccctcctcagtgtgggtgggctgagagttaaagacagtgtggctgcagtagcatagaggcgcctagaaattccacttgcaccgtagggcatgctgataccatcccaatagctgttgcccattgacctctagtggtgagtttctagaatactggtccattcatgagatattcaagattcaagagtattctcacttctgggttatcagcataaactggaatgtagtgtcagaggatactgtggcttgttttgtttatgtttttttttcttattcaagaaaaaagaccaaggaataacattctgtagttcctaaaaatactgacttttttcactactatacataaagggaaagttttattcttttatggaacacttcagctgtactcatgtattaaaataggaatgtgaatgctatatactctttttatatcaaaagtctcaagcacttatttttattctatgcattgtttgtcttttacataaataaaatgtttattagattgaataaagcaaaatactcaggtgagcatcctgcctcctgttcccattcctagtagctaaa

SEQ ID NO: 849 - protein, 592 aa, Homo Sapiens
MGRGLLRGLWPLHIVLWTRIASTIPPHVQKSDVEMEAQKDEIICPSCNRTAHPLRHINNDMIVTDNNGAVKFPQLCKFCDVRFSTCDNQKSCMSNCSITSICEKPQEVCVAVWRKNDENITLETVCHDPKLPYHDFILEDAASPKCIMKEKKKPGETFFMCSCSSDECNDNIIFSEEYNTSNPDLLLVIFQVTGISLLPPLGVAISVIIIFYCYRVNRQQKLSSTWETGKTRKLMEFSEHCAIILEDDRSDISSTCANNINHNTELLPIELDTLVGKGRFAEVYKAKLKQNTSEQFETVAVKIFPYEEYASWKTEKDIFSDINLKHENILQFLTAEERKTELGKQYWLITAFHAKGNLQEYLTRHVISWEDLRKLGSSLARGIAHLHSDHTPCGRPKMPIVHRDLKSSNILVKNDLTCCLCDFGLSLRLDPTLSVDDLANSGQVGTARYMAPEVLESRMNLENVESFKQTDVYSMALVLWEMTSRCNAVGEVKDYEPPFGSKVREHPCVESMKDNVLRDRGRPEIPSFWLNHQGIQMVCETLTECWDHDPEARLTAQCVAERFSELEHLDRLSGRSCSEEKIPEDGSLNTTK

SEQ ID NO: 850 - DNA, 1849 bp, Homo Sapiens
gcagcggggctgccgctggttggtccgcacgtggaacctctcctggtcctgttgacccgggcccctcggaacctccagcttggtccggtctgggactggaagcctgccatggcggcttctgcggcggagacgcgcgtgtttctggaggtgcggggacagctgcagagcgcgcttctgatcctgggagaaccgaaagaaggaggtatgcccatgaatatttccataatgccatcttcactccagatgaaaacccctgaaggctgcacagaaatccagcttccagcagaggtcaggcttgtaccttcctcttgccgtgggctacagtttgttgttggagatggactgcacctgcgactgcagacgcaagcaaaattaggcacaaaactgatttcaatgtttaatcaaagctcgcaaacccaagaatgttgcacgttttattgccaatcctgcggtgaagtcataataaaagacaggaagctcctcagggtgctcccactgccgagtgagaactggggagctctagttggagaatggtgttgtcatcctgacccctttgctaataaatcacttcatccgcaagagaatgactgttttattggagactctttcttcttggtgaatttaagaaccagtttgtggcagcaaagacctgaactatccccagtggagatgtgctgtgtttcttctgacaaccattgtaaattggaaccaaaggcaaataccaaagtaatttgtaagcgttgcaaggtaatgttgggagagaccgtgtcatcagaaaccaccaagttttatatgacagagataattattcagtcatctgagaggagttttcctatcataccaaggtcttggtttgtccagagcgtgatcgcccagtgtctggtgcagctctcctctgctagaagcacttttagattcacgattcaaggtcaggatgacaaagtgtatatcttgctatggcttttaaattcagacagtttggtgattgaatctttgagaaattccaaatatatcaaaaaattccccttgttggaaaacacattcaaagccgattctagttctgcctggagtgctgtcaaggtcctctaccagccatgcatcaaaagcaggaatgaaaaacttgtcagcttgtgggaaagtgacatcagcgtccacccgctaaccctgccctctgcaacctgcttggagctgctgttgatattgtcaaagagtaatgccaatctgccttcatcccttcgccgtgtgaattcctttcaggtggcctttttgaagatgtaactattagagctgggcattctcctcccccggcagacagctctcaagcaggagcacaccgaggccagcagtcagctcaggaggcatcaattacaaagacaagaaccagagctatgggataagagcattgcattgaagttttaagtttacttgtttgcatgtattctctaagagaagagttaactttagatctttgaaaacccaggactgtgaagaaagtcatagtagcaggttgaggcaagtgtagaagttacatctctatttcccacagagaggaatattcacatatgtgcagtgtcagcaccacctggaaggttattacctaatagagatccatctgtcctgtgtggaatccagtgaggaattttattggtggaactgaatgttaactgctgtaaatcctaggaaataaacttttaaagagtttctcaggatgatttaaaacaaattttaaaaaagaaaagtagaaaacattttatactttattcagaggagatgctcaatagatgtttgttgaatgaatgattatcaaattaaaggatttcctatttatgcaaaaaaaaaaaaaaaaaaa

SEQ ID NO: 851 - protein, 389 aa, Homo Sapiens
MAASAAETRVFLEVRGQLQSALLILGEPKEGGMPMNISIMPSSLQMKTPEGCTEIQLPAEVRLVPSSCRGLQFVVGDGLHLRLQTQAKLGTKLISMFNQSSQTQECCTFYCQSCGEVIIKDRKLLRVLPLPSENWGALVGEWCCHPDPFANKSLHPQENDCFIGDSFFLVNLRTSLWQQRPELSPVEMCCVSSDNHCKLEPKANTKVICKRCKVMLGETVSSETTKFYMTEIIIQSSERSFPIIPRSWFVQSVIAQCLVQLSSARSTFRFTIQGQDDKVYILLWLLNSDSLVIESLRNSKYIKKFPLLENTFKADSSSAWSAVKVLYQPCIKSRNEKLVSLWESDISVHPLTLPSATCLELLLILSKSNANLPSSLRRVNSFQVAFLKM

SEQ ID NO: 852 - DNA, 2577 bp, Homo Sapiens
ggcatcgggtttctggctcgtgatttgccggagctcctgcgctccccttctccaccccctccggctgtgtgagaggtcagcagaggggcggtctgcggggacaacaatggcggggttctgggtcgggacagcaccgctggtcgctgccggacggcgtgggcggtggccgccgcagcagctgatgctgagcgcggcgctgcggaccctgaagcatgttctgtactattcaagacagtgcttaatggtgtcccgtaatcttggttcagtgggatatgatcctaatgaaaaaacttttgataaaattcttgttgctaatagaggagaaattgcatgtcgggttattagaacttgcaagaagatgggcattaagacagttgccatccacagtgatgttgatgctagttctgttcatgtgaaaatggcggatgaggctgtctgtgttggcccagctcccaccagtaaaagctacctcaacatggatgccatcatggaagccattaagaaaaccagggcccaagctgtacatccaggttatggattcctttcagaaaacaaagaatttgccagatgtttggcagcagaagatgtcgttttcattggacctgacacacatgctattcaagccatgggcgacaagattgaaagcaaattattagctaagaaagcagaggttaatacaatccctggctttgatggagtagtcaaggatgcagaagaagctgtcagaattgcaagggaaattggctaccctgtcatgatcaaggcctcagcaggtggtggtgggaaaggcatgcgcattgcttgggatgatgaagagaccagggatggttttagattgtcatctcaagaagctgcttctagttttggcgatgatagactactaatagaaaaatttattgataatcctcgtcatatagaaatccaggttctaggtgataaacatgggaatgctttatggcttaatgaaagagagtgctcaattcagagaagaaatcagaaggtggtggaggaagcaccaagcatttttttggatgcggagactcgaagagcgatgggagaacaagctgtagctcttgccagagcagtaaaatattcctctgctgggaccgtggagttccttgtggactctaagaagaatttttatttcttggaaatgaatacaagactccaggttgagcatcctgtcacagaatgcattactggcctggacctagtccaggaaatgatccgtgttgctaagggctaccctctcaggcacaaacaagctgatattcgcatcaacggctgggcagttgaatgtcgggtttatgctgaggacccctacaagtcttttggtttaccatctattgggagattgtctcagtaccaagaaccgttacatctacctggtgtccgagtggacagtggcatccaaccaggaagtgatattagcatttattatgatcctatgatttcaaaactaatcacatatggctctgatagaactgaggcactgaagagaatggcagatgcactggataactatgttattcgaggtgttacacataatattgcattacttcgagaggtgataatcaactcacgctttgtaaaaggagacatcagcactaaatttctctccgatgtgtatcctgatggcttcaaaggacacatgctaaccaagagtgagaagaaccagttattggcaatagcatcatcattgtttgtggcattccagttaagagcacaacattttcaagaaaattcaagaatgcctgttattaaaccagacatagccaactgggagctctcagtaaaattgcatgataaagttcataccgtagtagcatcaaacaatgggtcagtgttctcggtggaagttgatgggtcgaaactaaatgtgaccagcacgtggaacctggcttcgcccttattgtctgtcagcgttgatggcactcagaggactgtccagtgtctttctcgagaagcaggtggaaacatgagcattcagtttcttggtacagtgtacaaggtgaatatcttaaccagacttgccgcagaattgaacaaatttatgctggaaaaagtgactgaggacacaagcagtgttctgcgttccccgatgcccggagtggtggtggccgtctctgtcaagcctggagacgcggtagcagaaggtcaagaaatttgtgtgattgaagccatgaaaatgcagaatagtatgacagctgggaaaactggcacggtgaaatctgtgcactgtcaagctggagacacagttggagaaggggatctgctcgtggagctggaatgaaggatttataacctttcagtcatcacccaatttaattagccatttgcatgatgctttcacacacaattgattcaagcattatacaggaacacccctgtgcagctacgtttacgtcgtcatttattccacagagtcaagaccaatattctgccaaaaaatcaccaatggaaattttcattgatataaatacttgtacatatgatttgtacttctgctgtgagattccctagtgtcaaaattaaatcaataaaactgagcatttgtctaaataaaaaaaaaaaaaa

SEQ ID NO: 853 - protein, 728 aa, Homo Sapiens
MAGFWVGTAPLVAAGRRGRWPPQQLMLSAALRTLKHVLYYSRQCLMVSRNLGSVGYDPNEKTFDKILVANRGEIACRVIRTCKKMGIKTVAIHSDVDASSVHVKMADEAVCVGPAPTSKSYLNMDAIMEAIKKTRAQAVHPGYGFLSENKEFARCLAAEDVVFIGPDTHAIQAMGDKIESKLLAKKAEVNTIPGFDGVVKDAEEAVRIAREIGYPVMIKASAGGGGKGMRIAWDDEETRDGFRLSSQEAASSFGDDRLLIEKFIDNPRHIEIQVLGDKHGNALWLNERECSIQRRNQKVVEEAPSIFLDAETRRAMGEQAVALARAVKYSSAGTVEFLVDSKKNFYFLEMNTRLQVEHPVTECITGLDLVQEMIRVAKGYPLRHKQADIRINGWAVECRVYAEDPYKSFGLPSIGRLSQYQEPLHLPGVRVDSGIQPGSDISIYYDPMISKLITYGSDRTEALKRMADALDNYVIRGVTHNIALLREVIINSRFVKGDISTKFLSDVYPDGFKGHMLTKSEKNQLLAIASSLFVAFQLRAQHFQENSRMPVIKPDIANWELSVKLHDKVHTVVASNNGSVFSVEVDGSKLNVTSTWNLASPLLSVSVDGTQRTVQCLSREAGGNMSIQFLGTVYKVNILTRLAAELNKFMLEKVTEDTSSVLRSPMPGVVVAVSVKPGDAVAEGQEICVIEAMKMQNSMTAGKTGTVKSVHCQAGDTVGEGDLLVELE

SEQ ID NO: 854 - DNA, 1374 bp, Homo Sapiens
ataagaggttgggctttggatagatagacagactcctgggtccggtcaaccgtcaaaatgtccaaagaacctctcattctctggctgatgattgagttttggtggctttacctgacaccagtcacttcagagactgttgtgacggaggttttgggtcaccgggtgactttgccctgtctgtactcatcctggtctcacaacagcaacagcatgtgctgggggaaagaccagtgcccctactccggttgcaaggaggcgctcatccgcactgatggaatgagggtgacctcaagaaagtcagcaaaatatagacttcaggggactatcccgagaggtgatgtctccttgaccatcttaaaccccagtgaaagtgacagcggtgtgtactgctgccgcatagaagtgcctggctggttcaacgatgtaaagataaacgtgcgcctgaatctacagagagcctcaacaaccacgcacagaacagcaaccaccaccacacgcagaacaacaacaacaagccccaccaccacccgacaaatgacaacaaccccagctgcacttccaacaacagtcgtgaccacacccgatctcacaaccggaacaccactccagatgacaaccattgccgtcttcacaacagcaaacacgtgcctttcactaaccccaagcacccttccggaggaagccacaggtcttctgactcccgagccttctaaggaagggcccatcctcactgcagaatcagaaactgtcctccccagtgattcctggagtagtgttgagtctacttctgctgacactgtcctgctgacatccaaagagtccaaagtttgggatctcccatcaacatcccacgtgtcaatgtggaaaacgagtgattctgtgtcttctcctcagcctggagcatctgatacagcagttcctgagcagaacaaaacaacaaaaacaggacagatggatggaatacccatgtcaatgaagaatgaaatgcccatctcccaactactgatgatcatcgccccctccttgggatttgtgctcttcgcattgtttgtggcgtttctcctgagagggaaactcatggaaacctattgttcgcagaaacacacaaggctagactacattggagatagtaaaaatgtcctcaatgacgtgcagcatggaagggaagacgaagacggcctttttaccctctaacaacgcagtagcatgttagattgaggatgggggcatgacactccagtgtcaaaataagtcttagtagatttccttgtttcataaaaaagactcacttattccatggatgtcattgatccaggcttgctttagtttcatgaatgaagggtactttagagaccacaacttctctgtcaaaaa

SEQ ID NO: 855 - protein, 378 aa, Homo Sapiens
MSKEPLILWLMIEFWWLYLTPVTSETVVTEVLGHRVTLPCLYSSWSHNSNSMCWGKDQCPYSGCKEALIRTDGMRVTSRKSAKYRLQGTIPRGDVSLTILNPSESDSGVYCCRIEVPGWFNDVKINVRLNLQRASTTTHRTATTTTRRTTTTSPTTTRQMTTTPAALPTTVVTTPDLTTGTPLQMTTIAVFTTANTCLSLTPSTLPEEATGLLTPEPSKEGPILTAESETVLPSDSWSSVESTSADTVLLTSKESKVWDLPSTSHVSMWKTSDSVSSPQPGASDTAVPEQNKTTKTGQMDGIPMSMKNEMPISQLLMIIAPSLGFVLFALFVAFLLRGKLMETYCSQKHTRLDYIGDSKNVLNDVQHGREDEDGLFTL

SEQ ID NO: 856 - DNA, 2082 bp, Homo Sapiens
accacacagacacacacctccttgctggagcattcactaggcgaggcgctccatcggactcactagccgcactcatgaatcggcaccatctgcaggatcactttctggaaatagacaagaagaactgctgtgtgttccgagatgacttcattgtcaaggtgttgccgccggtgttggggctggagtttatcttcgggcttctgggcaatggccttgccctgtggattttctgtttccacctcaagtcctggaaatccagccggattttcctgttcaacctggcagtggctgactttctactgatcatctgcctgcccttcctgatggacaactatgtgaggcgttgggactggaagtttggggacatcccttgccggctgatgctcttcatgttggctatgaaccgccagggcagcatcatcttcctcacggtggtggcggtagacaggtatttccgggtggtccatccccaccacgccctgaacaagatctccaatcggacagcagccatcatctcttgccttctgtggggcatcactattggcctgacagtccacctcctgaagaagaagatgccgatccagaatggcggtgcaaatttgtgcagcagcttcagcatctgccataccttccagtggcacgaagccatgttcctcctggagttcttcctgcccctgggcatcatcctgttctgctcagccagaattatctggagcctgcggcagagacaaatggaccggcatgccaagatcaagagagccatcaccttcatcatggtggtggccatcgtctttgtcatctgcttccttcccagcgtggttgtgcggatccgcatcttctggctcctgcacacttcgggcacgcagaattgtgaagtgtaccgctcggtggacctggcgttctttatcactctcagcttcacctacatgaacagcatgctggaccccgtggtgtactacttctccagcccatcctttcccaacttcttctccactttgatcaaccgctgcctccagaggaagatgacaggtgagccagataataaccgcagcacgagcgtcgagctcacaggggaccccaacaaaaccagaggcgctccagaggcgttaatggccaactccggtgagccatggagcccctcttatctgggcccaacctctccttaaataaccatgccaagaagggacattgtcaccaagaaccaggatctctggagaaacagttgggctgttgcatcgagtaatgtcactggactcggcctaaggtttcctggaacttccagattcagagaatgcgatttagggaaacggtggcagatgagtgggagactggttgcaaggtgtgaccgcaggaatcctggaggaatagagagtaaagcttctaggcatctgaaacttttgcttcatctctgacgctcgcaggactgaagatgggcaaattgtaggcatttctgctgagcagagttggagccagagatctacttgtgacttgttggccttcttcccacatctgcctcagactggagggggctcagctcctggggtgatatctagcctgcttgtgagctctagcagggataaggagagctgagattggagggaattgtgttgctcctggagggagcccaggcatcattaaacaagccagtaggtcacctggcttccgtggaccaattcatctttcagacaagctttagcagaaatggactcagggaagagactcacacgctttggttaatatctgtgtttccggtgggtgtaataggggattagccccagaagggactgagctaaacagtgttattatgggaaaggaaatggcattgctgctttcaaccagcgactaatgcaatccattcctctcttgtttatagtaatctaagggttgggcagttaaaacggcttcaggatagaaagctgtttcccacctctgtttgcttttaacattaaaagggaaatgtgcctctgccccacagttagaggggtgcacgttcctcctggttccttcgcttgtgtttctgtacttaccaaaaatctaccatttcaataaattttgataggagacaaaaaaaaaaaaaaaaaa

SEQ ID NO: 857 - protein, 363 aa, Homo Sapiens [sequence omitted]

SEQ ID NO: 858 - DNA, 4563 bp, Homo Sapiens
gggcggggacgccgcggcaggaaggccatggcggggcccgagcgctggggccccctgctcctgtgcctgctgcaggccgctccagggaggccccgtctggcccctccccagaatgtgacgctgctctcccagaacttcagcgtgtacctgacatggctcccagggcttggcaacccccaggatgtgacctattttgtggcctatcagagctctcccacccgtagacggtggcgcgaagtggaagagtgtgcgggaaccaaggagctgctatgttctatgatgtgcctgaagaaacaggacctgtacaacaagttcaagggacgcgtgcggacggtttctcccagctccaagtccccctgggtggagtccgaatacctggattacctttttgaagtggagccggccccacctgtcctggtgctcacccagacggaggagatcctgagtgccaatgccacgtaccagctgcccccctgcatgcccccactggatctgaagtatgaggtggcattctggaaggagggggccggaaacaagaccctatttccagtcactccccatggccagccagtccagatcactctccagccagctgccagcgaacaccactgcctcagtgccagaaccatctacacgttcagtgtcccgaaatacagcaagttctctaagcccacctgcttcttgctggaggtcccagaagccaactgggctttcctggtgctgccatcgcttctgatactgctgttagtaattgccgcagggggtgtgatctggaagaccctcatggggaacccctggtttcagcgggcaaagatgccacgggccctggacttttctggacacacacaccctgtggcaacctttcagcccagcagaccagagtccgtgaatgacttgttcctctgtccccaaaaggaactgaccagaggggtcaggccgacgcctcgagtcagggccccagccacccaacagacaagatggaagaaggaccttgcagaggacgaagaggaggaggatgaggaggacacagaagatggcgtcagcttccagccctacattgaaccaccttctttcctggggcaagagcaccaggctccagggcactcggaggctggtggggtggactcagggaggcccagggctcctctggtcccaagcgaaggctcctctgcttgggattcttcagacagaagctgggccagcactgtggactcctcctgggacagggctgggtcctctggctatttggctgagaaggggccaggccaagggccgggtggggatgggcaccaagaatctctcccaccacctgaattctccaaggactcgggtttcctggaagagctcccagaagataacctctcctcctgggccacctggggcaccttaccaccggagccgaatctggtccctgggggacccccagtttctcttcagacactgaccttctgctgggaaagcagccctgaggaggaagaggaggcgagggaatcagaaattgaggacagcgatgcgggcagctggggggctgagagcacccagaggaccgaggacaggggccggacattggggcattacatggccaggtgagctgtcccccgacatcccaccgaatctgatgctgctgctgcctttgcaaggactactgggcttcccaagaaactcaagagcctccgtacctcccctgggcggcggaggggcattgcacttccgggaagtccacctagcggctgtttgcctgtcgggctgagcaacaagatgcccctccctcctgtgacccgccctctttaggctgagctataagaggggtggacacagggtgggctgaggtcagaggttggtggggtgtcatcacccccattgtccctagggtgacaggccagggggaaaaattatccccggacaacatgaaacaggtgaggtcaggtcactgcggacatcaagggcggacaccaccaaggggccctctggaacttgagaccactggaggcacacctgctatacctcatgcctttcccagcagccactgaactcccccatcccagggctcagcctcctgattcatgggtcccctagttaggcccagataaaaatccagttggctgagggttttggatgggaagggaagggtggctgtcctcaaatcctggtctttggagtcatggcactgtacggttttagtgtcagacagaccggggttcaaatcccagctctgctgttcactggttgtatgatcttggggaagacatcttccttctctgcctcggcttcctcatctgcagctacgcctgggtgtggtgagggttctaggggatctcagatgtgtgtagcacggagcctgctgtgtcctgggtgctctctacgtggtggccggtagaattctccatctatccaggctccaggagacccctgggcatctcccacctgtggcccctaaacccagagtgactgagagcacttaacattcagcttgtctcatccccagtctacctccttccttctaccctcactgcctcccagtcaggagagtgagctctcagaagccagagccccacccaaggggaccctggtctctccgccttcacctagcaatgggaaccctgcttcccaggggaggaaccaactgctccaccttctagggacccagtttgttggagtaggacagtaacatggcaggaatcggacttctgggcctgtaatcccagtttggatggcacgttagactcttggttgaccgttgtggtccttagaagtcccattctcccttccagttatgagaaaccaatgccttctagattcaggtgactatccttacctgggggtgctgatgcatcctcagttaacctacacccacctgaatatagatgagcgtagctgagttttcacccgtaggaccgaagtgttttgtggtggagtatctgaacaaccttggctctgtggccattcaacctgccaggactaacatttctggatttgtgaagaagggatcttcaaagccattgaacccacagagctgtgttgctttaaagccaccacaagggtacagcattaaatggcagaactggaaaagcttcttagggcatctcatccagggattctcaaaccatgtcccccagaggccttgggctgcagttgcagggggcgccatggggctataggagcctcccactttcaccagagcagcctcactgtgccctgattcacacactgtggctttccacgtgaggttttgtttagagggatccactactcaagaaaaagttagcaaaccactccttttgttgcaaaggagctgaggtcaagggtggcaaaggcacttgtccaaggtcgcccagcagtgctgctctgatgacttgtgcacatccccaagggtaagagcttcgatctctgcacagccgggccaacctctgaccccttgtccatgtcagtaaaatatgaaggtcacagccaggatttctaagggtcaggaggccttcaccgctgctggggcacacacacacacatgcatacacacatacgacacacacctgtgtctccccaggggttttccctgcagtgaggcttgtccagatgattgagcccaggagaggaagaacaaacaaactacggagctggggagggctgtggcttggggccagctcccagggaaattcccagacctgtaccgatgttctctctggcaccagccgagctgcttcgtggaggtaacttcaaaaaagtaaaagctatcatcagcatcatcttagacttgtatgaaataaccactccgtttctattcttaaaccttaccatttttgttttgttttgtttttttgagtcggagttttgttctttttgcctaggctggagtgcagtggtacaatctcggctcactgcaacctccacctcccgggttcaagtgattctcctgcctcagcctcccaagtagctgggattacaggcacccgccaccacacctggctaatttttttgtatttttagtagagacggggtttcaccatgttggccaggctggtctcgaactcctgacctcaggtgatccgcccgcctcggcctcccaaagtgctgggattacaggcgtgagccaccgcgcccagccaaaccttactatttttttaaagaattttttccagagtttaatttctgacatagcttaagttttccagtaactctaaactccatctcctttatcgtcattaagtcattcacaaaaagccaggagaagcatttggaaagggcatgataatcagtataataatttgccttgtgtggtcagcacttaactgtttacaaagccctttcacgtgcacagcaggtgggaactgcgcggtgtgggctgggcctgcgctggaagcatatcccgtgaaaagtgttagtgccttaggtgaaagcaacatgtatccctttagactactaacggtatatgttgttcttatgtatttgtatttatttctattttttctatgtttatgtcatatttaaacgatatcctactgcttgttggtattaccctaaactgtttaaataaagagctctatttttaaagaaaaaaggtacaattga

SEQ ID NO: 859 - protein, 520 aa, Homo Sapiens
MAGPERWGPLLLCLLQAAPGRPRLAPPQNVTLLSQNFSVYLTWLPGLGNPQDVTYFVAYQSSPTRRRWREVEECAGTKELLCSMMCLKKQDLYNKFKGRVRTVSPSSKSPWVESEYLDYLFEVEPAPPVLVLTQTEEILSANATYQLPPCMPPLDLKYEVAFWKEGAGNKTLFPVTPHGQPVQITLQPAASEHHCLSARTIYTFSVPKYSKFSKPTCFLLEVPEANWAFLVLPSLLILLLVIAAGGVIWKTLMGNPWFQRAKMPRALDFSGHTHPVATFQPSRPESVNDLFLCPQKELTRGVRPTPRVRAPATQQTRWKKDLAEDEEEEDEEDTEDGVSFQPYIEPPSFLGQEHQAPGHSEAGGVDSGRPRAPLVPSEGSSAWDSSDRSWASTVDSSWDRAGSSGYLAEKGPGQGPGGDGHQESLPPPEFSKDSGFLEELPEDNLSSWATWGTLPPEPNLVPGGPPVSLQTLTFCWESSPEEEEEARESEIEDSDAGSWGAESTQRTEDRGRTLGHYMAR

SEQ ID NO: 860 - DNA, 3301 bp, Homo Sapiens
gtgcctcttgcagcagcctaacccagaagcaggggggaatcctgaatcgagctgagagggcttccccggttctcctgggaaccccatcggccccctgccagcacacacctgagcagcatcacaggacatggccccctcagccacctagctggggcccatctaggagtggcatcttttttggtgccctgaaggccagctctggaccttcccaggaaaagtgccagctcacagaactgcttgaccaaaggaccggctcttgagacatcccccaacccacctggcccccagctagggtgggggctccaggagactgagattagcctgccctctttggacagcagctccaggacagggcgggtgggctgaccacccaaaccccatctgggcccaggccccatgccccgaggaggggtggtctgaagcccaccagagccccctgccagactgtctgcctcccttctgactgtggccgcttggcatggccagcaacagcagctcctgcccgacacctgggggcgggcacctcaatgggtacccggtgcctccctacgccttcttcttcccccctatgctgggtggactctccccgccaggcgctctgaccactctccagcaccagcttccagttagtggatatagcacaccatccccagccaccattgagacccagagcagcagttctgaagagatagtgcccagccctccctcgccaccccctctaccccgcatctacaagccttgctttgtctgtcaggacaagtcctcaggctaccactatggggtcagcgcctgtgagggctgcaagggcttcttccgccgcagcatccagaagaacatggtgtacacgtgtcaccgggacaagaactgcatcatcaacaaggtgacccggaaccgctgccagtactgccgactgcagaagtgctttgaagtgggcatgtccaaggagtctgtgagaaacgaccgaaacaagaagaagaaggaggtgcccaagcccgagtgctctgagagctacacgctgacgccggaggtgggggagctcattgagaaggtgcgcaaagcgcaccaggaaaccttccctgccctctgccagctgggcaaatacactacgaacaacagctcagaacaacgtgtctctctggacattgacctctgggacaagttcagtgaactctccaccaagtgcatcattaagactgtggagttcgccaagcagctgcccggcttcaccaccctcaccatcgccgaccagatcaccctcctcaaggctgcctgcctggacatcctgatcctgcggatctgcacgcggtacacgcccgagcaggacaccatgaccttctcggacgggctgaccctgaaccggacccagatgcacaacgctggcttcggccccctcaccgacctggtctttgccttcgccaaccagctgctgcccctggagatggatgatgcggagacggggctgctcagcgccatctgcctcatctgcggagaccgccaggacctggagcagccggaccgggtggacatgctgcaggagccgctgctggaggcgctaaaggtctacgtgcggaagcggaggcccagccgcccccacatgttccccaagatgctaatgaagattactgacctgcgaagcatcagcgccaagggggctgagcgggtgatcacgctgaagatggagatcccgggctccatgccgcctctcatccaggaaatgttggagaactcagagggcctggacactctgagcggacagccggggggtggggggcgggacgggggtggcctggcccccccgccaggcagctgtagccccagcctcagccccagctccaacagaagcagcccggccacccactccccgtgaccgcccacgccacatggacacagccctcgccctccgccccggcttttctctgcctttctaccgaccatgtgaccccgcaccagccctgcccccacctgccctcccgggcagtactggggaccttccctgggggacggggagggaggaggcagcgactccttggacagaggcctgggccctcagtggactgcctgctcccacagcctgggctgacgtcagaggccgaggccaggaactgagtgaggcccctggtcctgggtctcaggatgggtcctgggggcctcgtgttcatcaagacacccctctgcccagctcaccacatcttcatcaccagcaaacgccaggacttggctcccccatcctcagaactcacaagccattgctccccagctggggaacctcaacctcccccctgcctcggttggtgacagagggggtgggacaggggcggggggttccccctgtacataccctgccataccaaccccaggtattaattctcgctggttttgtttttattttaatttttttgttttgatttttttaataagaattttcattttaagcacatttatactgaaggaatttgtgctgtgtattggggggagctggatccagagctggagggggtgggtccgggggagggagtggctcggaaggggcccccactctcctttcatgtccctgtgccccccagttctcctcctcagccttttcctcctcagttttctctttaaaactgtgaagtactaactttccaaggcctgccttcccctccctcccactggagaagccgccagcccctttctccctctgcctgaccactgggtgtggacggtgtggggcagccctgaaaggacaggctcctggccttggcacttgcctgcacccaccatgaggcatggagcagggcagagcaagggccccgggacagagttttcccagacctggctcctcggcagagctgcctcccgtcagggcccacatcatctaggctccccagcccccactgtgaaggggctggccaggggcccgagctgcccccacccccggcctcagccaccagcacccccatagggcccccagacaccacacacatgcgcgtgcgcacacacacaaacacacacacactggacagtagatgggccgacacacacttggcccgagttcctccatttccctggcctgccccccacccccaacctgtcccacccccgtgccccctccttaccccgcaggacgggcctacaggggggtctcccctcacccctgcacccccagctgggggagctggctctgccccgacctccttcaccaggggttggggccccttcccctggagcccgtgggtgcacctgttactgttgggctttccactgagatctactggataaagaataaagttctatttattctaaaaaaaaaaaaaaaaaa

SEQ ID NO: 861 - protein, 462 aa, Homo Sapiens
MASNSSSCPTPGGGHLNGYPVPPYAFFFPPMLGGLSPPGALTTLQHQLPVSGYSTPSPATIETQSSSSEEIVPSPPSPPPLPRIYKPCFVCQDKSSGYHYGVSACEGCKGFFRRSIQKNMVYTCHRDKNCIINKVTRNRCQYCRLQKCFEVGMSKESVRNDRNKKKKEVPKPECSESYTLTPEVGELIEKVRKAHQETFPALCQLGKYTTNNSSEQRVSLDIDLWDKFSELSTKCIIKTVEFAKQLPGFTTLTIADQITLLKAACLDILILRICTRYTPEQDTMTFSDGLTLNRTQMHNAGFGPLTDLVFAFANQLLPLEMDDAETGLLSAICLICGDRQDLEQPDRVDMLQEPLLEALKVYVRKRRPSRPHMFPKMLMKITDLRSISAKGAERVITLKMEIPGSMPPLIQEMLENSEGLDTLSGQPGGGGRDGGGLAPPPGSCSPSLSPSSNRSSPATHSP

SEQ ID NO: 862 - DNA, 5351 bp, Homo Sapiens
gcgattcggctggctctgccacaccaccgcgcgcccccgctccgcccgcccctccgggcgcgtcttttccgggctcgcgctgagtcccgcctccgccggctgtccgggtgcgcgcgcgccgctgcggctttttctctggcctccgccgcgcgctcctcctcgtcccagcgctagcgggcacgcggttcctttttgcgagctttccgagtgccaggcgccggccggctgcgaagacgcggtgggccgcccctccgattgaaatcacagaagatattcgtgttcttcttaagagaaaaagaggacattttagctttctcagttgaaggcgtactttattgtcggcttccaaagattactaacttttatctgtatcactaagattgaactgccttggctgtactgctattcttactgctgcttctattattgccttcttcagcacaataaggctttcaaaagccaaagaataacaagaaataagcaccattttagaagcctttccactatgaaacttaagctaaatgtgctcaccattattttgctgcctgtccacttgttaataacaatatacagtgcccttatatttattccatggtattttcttaccaatgccaagaagaaaaacgctatggcaaagagaataaaagctaagcccacttcagacaaacctggaagtccatatcgctctgtcacacacttcgactcactagctgtaatagacatccctggagcagatactctggataaattatttgaccatgctgtatccaagtttgggaagaaggacagccttgggaccagggaaatcctaagtgaagaaaatgaaatgcagccaaatggaaaagtttttaagaagttaattcttgggaattataaatggatgaactatcttgaagtgaatcgcagagtgaataactttggtagtggactcactgcactgggactaaaaccaaagaacaccattgccatcttctgtgagaccagggccgaatggatgattgcagcacagacctgctttaagtacaactttcctcttgtgactttatatgccacacttggcaaagaagcagtagttcatgggctaaatgaatctgaggcttcctatctgattaccagtgttgaacttctggaaagtaaacttaagactgcattgttagatatcagttgtgttaaacatatcatttatgtggacaataaggctatcaataaagcagagtaccctgaaggatttgagattcacagcatgcaatcagtagaagagttgggatctaacccagaaaacttgggcattcctccaagtagaccaacgccttcagacatggccattgttatgtatactagtggttctactggccgacctaagggagtgatgatgcatcatagcaatttgatagctggaatgacaggccagtgtgaaagaatacctggactgggaccgaaggacacatatattggctacttgcctttggctcatgtgctagaactgacagcagagatatcttgctttacctatggctgcaggattggatattcttctccgcttacactctctgaccagtccagcaaaattaaaaaaggaagcaaaggagactgtactgtactgaagcccacacttatggctgctgttccggaaatcatggatagaatttataagaatgttatgagcaaagtccaagagatgaattatattcagaaaactctgttcaagatagggtatgattacaaattggaacagatcaaaaagggatatgatgcacctctttgcaatctgttactgtttaaaaaggtcaaggccctgctgggagggaatgtccgcatgatgctgtctggaggggccccgctatctcctcagacacaccgattcatgaatgtctgcttctgctgcccaattggccagggttatggactgacagaatcatgtggtgctgggacagttactgaagtaactgactatactactggcagagttggagcacctcttatttgctgtgaaattaagctaaaagactggcaagaaggcggttatacaattaatgacaagccaaaccccagaggtgaaatcgtaattggtggacagaacatctccatgggatattttaaaaatgaagagaaaacagcagaagattattctgtggatgaaaatggacaaaggtggttttgcactggtgatattggagaattccatcccgatggatgtttacagattatagatcgtaagaaagatctagtgaagttacaagcaggagagtatgtatctcttgggaaagtagaagctgcactgaagaattgtccacttattgacaacatctgtgcttttgccaaaagtgatcagtcctatgtgatcagttttgtggttcctaaccagaaaaggttgacacttttggcacaacagaaaggggtagaaggaacttgggttgatatctgcaataatcctgctatggaagctgaaatactgaaagaaattcgagaagctgcaaatgccatgaaattggagcgatttgaaattccaatcaaggttcgattaagcccagagccatggacccctgaaactggtttggtaactgatgctttcaaactgaaaaggaaggagctgaggaaccattacctcaaagacattgaacgaatgtatgggggcaaataaaatgttgttgtcttattgacagttgtgcaggaggtagcctggtggttttcaacctctagaattttaagcctttgttgaactgttagaatgtaaggtatatcattctaaagatagagtaaaaagaaaacaaaaccaaaagttattaaaattgttgtccggtttactttaacttagttttgcatagttctagtgcagctgaaattgaaaagttatttccctttagctgtgttattatagagcagaaattctgtttttaaaaattagcctaagatatacttgtttttgtaaagaaaaatatttaatgttgaacaaaataaattggagttggagtagaatgtagtttgaggaaatttgcagcttccaatgcctcttgtcttcctatttcagaagtttaaatattaagcatgacagaaaatatgtattaacactactcaaagcaaaagtgctgcagggctttaaaattctcttccaaccatttatcttgaaggaaaaattcaatagtaatataatacacaaaatcaaataataccttagaaggtattaagattataattgttgcataggttagatatagagtcattgtaatgttgtgaataattacagtgcctaaaataagaatagaacaacatatacaacaccaaaaaatatctagtaatatatttaaagggaaattgagctgctttttttgaaactttgagatctaaaaataactgtaattatttgaatgactaagaggaaagtacattttttgaaatgctgaaaattgcctttctgtgtttattcaaactgaaaagctgagaccaagagcaaggaaggtaaaaagttaacaggcaaacattttctcttagaaaaggtgataaaatcataagtatttggaattagaacccttgcacagcactgaacctgggaaagagatttaaactctgaatttatctttgataacagggattgattttaaaatgtacatgtattaaattacatttgtaatttaaggtctgtttgctgttgctgattttattcttgatcagtagtttgcatttcagaaagcctttcattttgctttaattttagcaaagcgggttataatgaatgacttccccaatatcttgcttgaacttacaggtgattaacttggatgagttttgggaagttaaagggaagaaaacactgttatcattttttcctgtttgggaagagcttagaaactggaaatactagatttgggagaagggcagagttacttgataagggactgatgtttgtgcagtaacttgggagtgtggtttctttttgaatctttaattaaaacctgggattatatatccctgataaatattcacacttgaaccatagttactgtaaaatgcaaaaaatcttaatactgttattctttgcactttttcttaatcattttttatatatatgcatatatatatgtgtgtgtgtgtgttgcttatgttgttttgtacagatgtgggccaccattgcaacaaaatacattctttttgctctaaaatatttatgaagaaaatacttaaatgttatgtatatggtggtaataagggaaaaatcaagtattataaacaagaatgaaggtttttgtaaagatttctgttcagcgttttgcaaggtaaaattttaggcaagttttccctgaagttatgtgtatgtgagtattctcattcttcccaacttgcctttgaagagtgaaataccattattatcaagtagactactgttcagcttttattcctgccctgctgtttatcccttaagaatgagtttcttagacttttccaatatgtgattttttttcccatttagaatggtgattttaaatgtgtgagtgcatgtactatcttatctcagatatttgcacccccaatctgcccccaactcccaaaagctagaacactgccaactgatctgttataggtcctttagaaacacataattaacacttaaggttgggtgctgctaattctttgcaaaaatccaaatattgttaagggaccagggagatgccactaccccttgattttccatctaaaaatatacatgtttatgtaaacaaatctttccatatccatagtgacttttcaagtatttaagcctaaagattttgatctcacatttttatacctgtttaaattgctcacagttattacatacacatcagccatcaactaaagttgtactttaaaaatttactacaatatgtacatttctaagtcaaacacttgtgacttttgctttaattccatgaatgttcctgcctccttgatatttgtatttattctttttttctctagagtagaggtataattgtgtgatatttcagaaatacagataaatgattcaaaaagtcacagttaaggagaatcatgtttctttgatcatgaataactgattagtaagtcttgcctatattttcctgatagcatatgacaaatgtttctaaggtaacaagatgagaacagataaagattgtgtggtgttttggatttggagagaaatattttaatttttaaatgcagttacaaattataatgtattcatatttgtactttctgttaaaatgcatgattgcagaattgtttagattttgtgtttattcttgatgaaaagctttgtttgttcttgtttttaagtttgcactcaaatcttaagaaataaatccacccatgttatcaaaaaaaaaaaaaaaaaa

SEQ ID NO: 863 - protein, 711 aa, Homo Sapiens
MKLKLNVLTIILLPVHLLITIYSALIFIPWYFLTNAKKKNAMAKRIKAKPTSDKPGSPYRSVTHFDSLAVIDIPGADTLDKLFDHAVSKFGKKDSLGTREILSEENEMQPNGKVFKKLILGNYKWMNYLEVNRRVNNFGSGLTALGLKPKNTIAIFCETRAEWMIAAQTCFKYNFPLVTLYATLGKEAVVHGLNESEASYLITSVELLESKLKTALLDISCVKHIIYVDNKAINKAEYPEGFEIHSMQSVEELGSNPENLGIPPSRPTPSDMAIVMYTSGSTGRPKGVMMHHSNLIAGMTGQCERIPGLGPKDTYIGYLPLAHVLELTAEISCFTYGCRIGYSSPLTLSDQSSKIKKGSKGDCTVLKPTLMAAVPEIMDRIYKNVMSKVQEMNYIQKTLFKIGYDYKLEQIKKGYDAPLCNLLLFKKVKALLGGNVRMMLSGGAPLSPQTHRFMNVCFCCPIGQGYGLTESCGAGTVTEVTDYTTGRVGAPLICCEIKLKDWQEGGYTINDKPNPRGEIVIGGQNISMGYFKNEEKTAEDYSVDENGQRWFCTGDIGEFHPDGCLQIIDRKKDLVKLQAGEYVSLGKVEAALKNCPLIDNICAFAKSDQSYVISFVVPNQKRLTLLAQQKGVEGTWVDICNNPAMEAEILKEIREAANAMKLERFEIPIKVRLSPEPWTPETGLVTDAFKLKRKELRNHYLKDIERMYGGK

SEQ ID NO: 864 - DNA, 6162 bp, Homo Sapiens
attgatctctgttgccgctcagggaggtcagctccaggccctcagcctttcggccgggagccaaactgccctgcctgccaagcccctccttctctgcaccttaaacagccgcgaggggagagtcggctgggattttcttcttaagaagtcgcgcaggtttttcgagctccactctgcgccaggagagccacggcagcaggaacgggcactgctgccaccgggccgacggagctgcatcctgtggccctataacactcttctccaaaaggacctgccagagactgggagtgttgactgctgcaaggaccaaggtgggatagtaacatctttttgagggaagaattggcttcctttcttgaaagtggtgaaggtacagcatatagctgcatggaagaaacagtaatcggatggctaccttctacattttgtattaggaaacaaagtccattgtaagagtccatgttgatcttggaaatagaaggattgaaaaaagctaaatttccacaaagaacaagaacttgaccatctcctttttgatctgaagactaggggacaatggatatcatagagacagcaaaacttgaagaacatttggaaaatcaacccagtgatcctacgaacacttatgcaagacccgctgaacctgttgaagaagaaaacaaaaatggcaatggtaaacccaagagcttatccagtgggctgcgaaaaggcaccaaaaagtacccggactatatccaaattgctatgcccactgaatcaaggaacaaatttccactagagtggtggaaaacgggcattgccttcatatatgcagttttcaacctcgtcttgacaaccgtcatgatcacagttgtacatgagagggtccctcccaaggagcttagccctccactcccagacaagttttttgattacattgatagggtgaaatgggcattttctgtatcagaaataaatgggattatattagttggattatggatcacccagtggctgtttctgagatacaagtcaatagtgggacgcagattctgttttattattggaactttatacctgtatcgctgcattacaatgtatgttactactctacctgtgcctggaatgcatttccagtgtgctccaaagctcaatggagactctcaggcaaaagttcaacggattctacgattgatttctggtggtggattgtccataactggatcacatatcttatgtggagacttcctcttcagcggtcacacggttacgctgacactgacttatttgttcatcaaagaatattcgcctcgtcacttctggtggtatcatttaatctgctggctgctgagtgctgccgggatcatctgcattcttgtagcacacgaacactacactatcgatgtgatcattgcttattatatcacaacacgactgttttggtggtaccattcaatggccaatgaaaagaacttgaaggtctcttcacagactaatttcttatctcgagcatggtggttccccatcttttatttttttgagaaaaatgtacaaggctcaattccttgctgcttctcctggccgctgtcttggcctcctggctgcttcaaatcatcatgcaaaaagtattcacgggttcagaagattggtgaagacaatgagaaatcgacctgaggagcaaaacaaaggcatcagctcttacaccaaaagagttaacgctgtaaccaaaggtatagttttgttttttattttaggagaactgactggtaaatgaagaaatggaccaaattttgtgtaaacgattagaaagatgaacaaagtattgccctttgactggttttcttcttcatcctgagaaagatacattctcttgcagctcttcattcattggtgacaagcccccaccccgggactttactaatgagcttgttaaagaggtgccaaagaacatattcctcctttctttattctttctccaccaaaaccctctacttcagaattttttcaggatatttttcagcccaaggtcagaagaatgtgttaatattttaaataaaatatctggacatctacagccactgtgtaaatagaactgcctaatgttgagagtggtttttagcattaggtttagcaagggggagatccgtgggttgtgcgtcagctttgggtgaattttgtttctaccctgtcacggggaaagttcgggttgagtccaggagtgcacactgctgctgccacccaatgcgctacatatcacttttttttgttttgttttgttttgtttttaaaagatcattttatcttaaaaaggaaagctgatccaagtaaacacgaaagtatttgacacaccccacagattttacatgtgtgtaaatgtttcactttaaaatctctatgacagatacacaggaaacatgagatggtttctgctaatgagtggcccttgagtacacacttagatgctgtctgccctgtaaatttggatctggtgccccagggcagtcaactcttctagcacaggctgaaaacacgtgtgtgtcaactgaggttcacaccacttggggaatgagcctgttttctttccaggtcaggccctggtgtgagatcaattttagggctcctaattggagcacagaaatgtatttggtcaaatttcattgaaggtgatttcttcctttttctgttgtactttatggaaaaaccaagatggaacctgaaagttaatgtatccttgcttttagcaagagactcagtttcttataactagtcctaaggacatatgccgcaattgagtaattttacttttaccctatgaaaataacatggtgctgcactataatatactctcggaatcagtgtgttagttacagctatacagtgaagggggataactgtttctaaatttctttaaggtgatgccaaaaaatggattaaaaaatctgatcagatttaatgttaccagatttagtgcattatttaatgctattggatcttttggataattcttggcttaatttcttagctacttgaaggttaatttgcaagacttttaaaaccttagaaaagttttaaggttgcaaagttatcaacactggggcagagggtggagaggccaatgcgggtagaaggaggcagttatgtttatattgaaggtgaaatttttctttcatttagaatggaaaacatccccaaatgtatcattataaactagtcagccttgactacacaaaattgacctttaagttgcttgagaaaaacacaatgcaaatcgttcagaagggtcaacatcctttggtgctaaaatcttgtgtatgttttcagaatggctttttctgtatgttatagaataatcactaaaggaaaggtagttgaatttaaagtcatgaagcaagactctttaattcagttattttaaacaagaattaaaaccccaaacatccttggcaggctttgaagcacacagaattttctagtatttcttattaaatacaccaataataaacatatacttagtttacctgatgagtttagacataattctatataatgttcgcttatattcatttattaactagcaacacttgtgcaagaacaaggtattctgcttgaaaacactgatttttaagttcctgttgcccgattgtaaagaaaatcatctgacacagaagcctggattttgctctcctaacactggtgttttccttgagcctctaattcaaataaaacaaactgatacaccttacagccttattcatctgtgtctggataactcacttttcatctattgaataagaaaaagtgtttaaacttaataaaataaaaaattgtgcaccaattactacagatccttgaaacagtaagccttggattttagtcaagtaatccagtttttttttaatttaaaaaaaaccatcaccttttaaagaactttaaaaacacctgtgatgccaatgtggacattgccgctgccatgtctttacacgcatgtgtcgtatagctctgtcatcgagttgaggaagtccatggtttgcaaataagggtgggggaatcaaaatttcaagatggaaaaataaaacaaatagtaaaacccatttacatgtaggaaagaaaagttgagcttcaacccaatgtgccactttgatataaaacaagtatgatatatatataaactgaagatataaaacaagtatgatcttgcctttgaaatcataaatgtttggggtacctgttctttgccagttaagatacatatcttattatctttgtttttttcaagtctatgctcctgtttgaagcttttcctgtaatttaggttgtctgtgaaatacctataacatataattcctatagagtatgccacattttttttctaactcatttcaaatgaaattctctcagattctagtttttgagcttgtccactagatctgaaaataaagcatcctttcctgagtccacttgaactaattgtgaatttgttacttaatttactggcatcttgggaaacaagttttgctgtggcaggaaggctgttttgagagtgagcgttgagtctactctggtttgtggatgacattgcattagggttatttcctgtattaccagtgcccccttgtggcaatatactttatgacttggaatgcaaacaccacttttaaaagcctgttttcaagtttttgaaaggcatttgttttctgttgtttgccaataatctgaaagtatcatgtgaaaggaattattttaaaagcattttaaacctttcccaaaggtaaaatgtgctcagattataggcacttgtaattctaaccttgtatccatttgatcaaagaaaatttgtagaacatttttacctctcatgatcacaatcattagtgtctccctttataacgacctatgttttgtttactttgaaacaccaaatttgttgtcttggttttttttacatgacagaactcatgcagtttcttttttagttgaaagttcacatcttgccccttgaatagtttgaacatttctttcttaattcttttttgtttttgttttgcactgtaaaactgatgaaaactttaagccaatcttaatgcactagcctctgtagtgtaaggaagtgtgagaaggagtttcttaatgagtttacacgtttaaatcaagcatattataagttatatgccatgtgttgaaggcttttctatttatatatataaagatttttagtatttgtttttagtgtccttgtgttgcaataatttaactcctttgactcagttgctgaaaatatttcttctattaagaagtgctcttgacttcaacacccaaacactgaaaatcatgtcaatgttacccaaagataagtttttatacagatacacaccttataagttctgatttattttcttactcattatgctgtgttctaaataaatcatgaatgagaagagtgctttattgtgaaattatttaaaactgtcctttaaaagaaaaagaggaaacgatgaacaaaaactaatctaattgccaagttagaattcattatttaatttacctcctatgcaatgattaatgctgcaaaatgtatggttatgttaccgtatattcacaaaagaaatattattacaaggtttcagaggtagccaattgcattcttttggaaatttactgtactgtttcaatgtgttaagtgccttgttgtaaagtaaaattttaagtctagattcattattttcctgacatatatttttcattatgatatctactgtatgctattgtgatagttttatgaaatgcttacattttaatcaaatatgtaaatttcagaagctcttttttcctacccaccagtaccttaatcattggtttatcacattggattcaaattcaggttccttttttgataaagaggaaatttgttttccatgcttgtgattttgtgtttgtaaacatttcaggaggaatttaggagtgtaactatagtttatacttctataatgttgtcttacatttacatttttaagtgcctaattgttaaaactgatttatgtttctcttctaaagaggatatgtgtacttggtttctaatctctttggttttgctttttaaaaaatgcaagagcctatactttgtatttacctaataaaccacagtgacatcaacagtcttttcaaaattaaaaaaaaaaaaaaaaa

SEQ ID NO: 865 - protein, 365 aa, Homo Sapiens
MDIIETAKLEEHLENQPSDPTNTYARPAEPVEEENKNGNGKPKSLSSGLRKGTKKYPDYIQIAMPTESRNKFPLEWWKTGIAFIYAVFNLVLTTVMITVVHERVPPKELSPPLPDKFFDYIDRVKWAFSVSEINGIILVGLWITQWLFLRYKSIVGRRFCFIIGTLYLYRCITMYVTTLPVPGMHFQCAPKLNGDSQAKVQRILRLISGGGLSITGSHILCGDFLFSGHTVTLTLTYLFIKEYSPRHFWWYHLICWLLSAAGIICILVAHEHYTIDVIIAYYITTRLFWWYHSMANEKNLKVSSQTNFLSRAWWFPIFYFFEKNVQGSIPCCFSWPLSWPPGCFKSSCKKYSRVQKIGEDNEKST

SEQ ID NO: 866 - DNA, 1515 bp, Homo Sapiens
ccggcccacgccagctcccggccgcggcacagcagccccggcgctccccgcgccgccccgcgcaggcgcccccgccccgccgtcgccgccgccgcagccaggagccgctgcaccatgccccgcatagatgcggacctcaagctcgacttcaaggatgtcctgctccgacctaagcggagcagcctcaagagccgagccgaggtggatcttgaacgcaccttcacgtttcgaaattcaaagcagacctactcagggattcccatcatcgtggccaacatggacactgtgggcacgtttgagatggcagccgtgatgtcacagcactccatgtttacagcaattcataagcattactccctggatgactggaagctctttgccacaaatcacccagaatgcctgcagaatgtagccgtgagttcaggcagtgggcagaatgatctggaaaagatgaccagcatcctggaagctgtgccacaggttaagtttatttgcctggatgtggccaatgggtattcagaacattttgtggaattcgtgaaacttgtccgtgccaaatttcctgaacacaccattatggcagggaacgtggtgacaggagaaatggtagaagagcttattctttccggagcagatatcatcaaagtgggagttggaccaggttctgtgtgcaccacccgcaccaagacgggagtggggtacccccagctgagtgccgtcattgagtgtgccgactctgcccatggcctgaagggccacatcatctctgatggaggctgtacgtgtccaggggatgtcgccaaagcctttggagctggagcagattttgtcatgctgggaggaatgttttcgggtcatacggagtgtgctggagaagtgtttgagaggaacggacggaagctcaagctcttctacgggatgagctctgacaccgccatgaacaagcacgcaggaggagttgctgagtacagagcctctgagggtaagactgtggaagttccttacaaaggagatgtggaaaacactatcctggatattctcgggggactgaggtccacgtgcacctacgtgggggccgccaaactcaaggagctcagcaggagggcaacattcatccgggtgacccagcagcacaacaccgtgttcagctaaccctggggacaaagcagcgtctggctcgagtggaagcgtccaaacctgcttttcccatctccccccaagtctgttccgtcagagcttctggctgctcctgaatggtggaatgctgtgtcctctcttctgtctcctgctgcctggaggcttcggggctctcccgcctgccttctcggggcccagacgcaaggcaccgattgggccaacatcagagccctgctgcccagaactcataacctcattgttcaaaccaacacttgcacctttctctttttctctttctctctccctttctttgtttttctttcttttttaaaagaagatggtttcactttaatataatgctattatcttaagacttaa

SEQ ID NO: 867 - protein, 345 aa, Homo Sapiens
MPRIDADLKLDFKDVLLRPKRSSLKSRAEVDLERTFTFRNSKQTYSGIPIIVANMDTVGTFEMAAVMSQHSMFTAIHKHYSLDDWKLFATNHPECLQNVAVSSGSGQNDLEKMTSILEAVPQVKFICLDVANGYSEHFVEFVKLVRAKFPEHTIMAGNVVTGEMVEELILSGADIIKVGVGPGSVCTTRTKTGVGYPQLSAVIECADSAHGLKGHIISDGGCTCPGDVAKAFGAGADFVMLGGMFSGHTECAGEVFERNGRKLKLFYGMSSDTAMNKHAGGVAEYRASEGKTVEVPYKGDVENTILDILGGLRSTCTYVGAAKLKELSRRATFIRVTQQHNTVFS

SEQ ID NO: 868 - DNA, 7202 bp, Homo Sapiens
gatgtgtgtggggttcggagccgcgccggcacagccgaagggagcgggcgagcggcgacggcggcggcggcgggcacagattaattaaaagaagaatgaactataatccttgaagataactgggcaattttttaagtcggaggctgttcttactggtgtgaggatttacacacgtcttcagtttttcagcacagaccagcagaccatcatttttagaggaaatactccctctgccctcctttttggtttccttggtggtaaagattaaatttggttgcatcattttgacttgtgtttgagtctagattttatggcacaaggaatggcataaacttttcatgtgttttggttaaaacaaaccagaccattgcattgaccctggacatctttaattgagaaattggtaactttattttaatatgtatatctgaagaattcaagaaaacaaaggcatcctcagaggtgtgcctcttttctttattattagaggcaaaacgaacaattttataggatttgtagtgaaattataccagattataaggagaaccaaaactaagtcgcaaaatttattaatttaaggggctctcgctttgaaagtttgagagtaagttacgataggcatttgtatccattcattactttcctcttttcaaataagcaactaaatagaaatgctaatctcagacttaattatttaacagaagagtgtaccatggaaaacctccagacaaatttctccttggttcagggctcaactaaaaaactgaatgggatgggagatgatggcagccccccagcgaaaaaaatgataacggacattcatgcaaatggaaaaacgataaacaaggtgccaacagttaagaaggaacacttggatgactatggagaagcaccagtggaaactgatggagagcatgttaagcgaacctgtacttctgttcctgaaactttgcatttaaatcccagtttgaaacacacattggcacaattccatttaagtagtcagagctcgctgggtggaccagcagcattttctgctcggcattcccaagaaagcatgtcgcctactgtatttctgcctcttccatcacctcaggttcttcctggcccattgctcatcccttcagatagctccacagaactcactcagactgtgttggaaggggaatctatttcttgttttcaagttggaggagaaaagagactctgtttgccccaagtcttaaattctgttctccgagaatttacactccagcaaataaatacagtgtgtgatgaactgtacatatattgttcaaggtgtacttcagaccagcttcatatcttaaaggtactgggcatacttccattcaatgccccatcctgtgggctgattacattaactgatgcacaaagattatgtaatgctttattgcggccacgaacttttcctcaaaatggtagcgtacttcctgctaaaagctcattggcccagttaaaggaaactggcagtgcctttgaagtggagcatgaatgcctaggcaaatgtcagggtttatttgcaccccagttttatgttcagcctgatgctccgtgtattcaatgtctggagtgttgtggaatgtttgcaccccagacgtttgtgatgcattctcacagatcacctgacaaaagaacttgccactggggctttgaatcagctaaatggcattgctatcttcatgtgaaccaaaaatacttaggaacacctgaagaaaagaaactgaagataattttagaagaaatgaaggagaagtttagcatgagaagtggaaagagaaatcaatccaagacagatgcaccatcaggaatggaattacagtcatggtatcctgttataaagcaggaaggtgaccatgtttctcagacacattcatttttacaccccagctactacttatacatgtgtgataaagtggttgccccaaatgtgtcacttacttctgctgtatcccagtctaaagagctcacaaagacagaggcaagtaagtccatatcaagacagtcagagaaggctcacagtagtggtaaacttcaaaaaacagtgtcttatccagatgtctcacttgaggaacaggagaaaatggatttaaaaacaagtagagaattatgtagccgtttagatgcatcaatctcaaataattctacaagtaaaaggaaatctgagtctgccacttgcaacttagtcagagacataaacaaagtgggaattggccttgttgctgccgcttcatctccgcttcttgtgaaagatgtcatttgtgaggatgataagggaaaaatcatggaagaagtaatgagaacttatttaaaacaacaggaaaaactaaacttgattttgcaaaagaagcaacaacttcagatggaagtaaaaatgttgagtagttcaaaatctatgaaggaactcactgaagaacagcagaatttacagaaagagcttgaatctttgcagaatgaacatgctcaaagaatggaagaattttatgttgaacagaaagacttagagaaaaaattggagcagataatgaagcaaaaatgtacctgtgactcaaatttagaaaaagacaaagaggctgaatatgcaggacagttggcagaactgaggcagagattggaccatgctgaggccgataggcaagaactccaagatgaactcagacaggaacgggaagcaagacagaagttagagatgatgataaaagagctaaagctgcaaattctgaaatcatcaaagactgctaaagaatagaaactgttaaagagattcatctgtgtattactgacaaggttttttttgtttgttgcttgctttggtaattgaattctgaagaatttatctgcatgacgataactaggcattctatccatttgtagatcagagaaagtgaagagattatatattagtacttaaatttttacattttccaaatgaatgaaaatgtatgtttctttgtacttttttaaaaaaatcagcttagtaacaatactatatggtttcaactagtaggtaatctgcttatatttctaatgcaaacttaacaattgtgtactttttaaaagctgcaatatgtgttggaaaatagctgtggtcaattttgttatccatatttcagactcaattttagatacaatggtggctttatattttaagtatatagagctactcaaggagttgaatctccccttttctcattaacacaatttttctaagttgatatggtgtactcattaacatacaccaaatttacttttactttgttcagattgtggaatgaatttccaccagttctcttctttttaatgtgtaccctaggaggaattttactgaggttatagcataccccatgagcacagtggggaagaagaatgtgttgttatgtgctgctgctaaacagaagcagcagttgtaatttgtttttcagtttaaatgtggttatagttagatttttttttaagcagcaacttttcaaaaataaaatgtgataatttctgaacttttgtttgtgttgttaatagtggtgtgaaaatattaacgttcttgagaaaaactgataccactgttgtgtatcagtttctatacaatccataatcctcctgtacagtttttacatgtagttatgagtcttactaaaatttatataatggacttgttttcctttaagttgtaaaatgttaaacaccttgaaggttattttggacttctgtatgtttaaatgttgtcttaccaaaatttgcacgaatggaccattttcatttactacttaatatcaaaatcaggaatttacagtcaactgatagtacatgataggtgcatataggacagtttagttacctgctactaaaagatttttagataagttttagaagataaaggaattccatagtttcaggagggacaacatcttctgcactttttttttgcacagaaaagtctgtcattctctaatggcaaatttcatatttgttaattcttggctcaaaatatattaggtaaaattcttagatctgtttttaaagggagtttcctgaaactatcattaattgacattattaccccatggattttatgggataataaatgtttttcatgttctcttataagatactatgtatgaaattacttcagagagctatatttattttaaaataaattagctagggttaaggttatattctatttccagcatagaaggtagataatctaatggtgtagaaagaatcactaggttgtcatttaaccagttattttcatattttgcttaatagtacatatccaaaaagaattttgtacttccccaaatgtaatttatttactaaattgagtataacctaaatgtgtgttttctattttccatttaaattttgctatattaagactaatttaattcgttgagtcttggaatcttctcaaggaggaacaaatattaaaatgacatgtagaaacaaatttttttttttttttttttttttttttttttgagacagagtctcgctgtctcccaggctggagttcagtggtgcaatctcggctcactgcaagctctgcctcctgggttcaagccattctcctgcctcagcctcccgagtagctgggactacaggcacccaccaccactcccggctaatttttagaaacaaatatttaaaatgacatattctcccaatacaatctatttagatctggagaaggaaaaatcagatatttatgatatagttttattttaattttgaattatttgtgtcacagctcagctttttggaagacaaactcaaacacctataatttcatttatatttctaattcacttggaacctttctgctttatgttacctagaaaatgataatttgtttaacccaaaacttctaaaataaattgcttaatccttgaaatatgttattggaaaattttaagcagtgcttaaacaccattaaattattatgaacttgtaattcagaattgagtaaagaaatattttttctagtccttcatatattgaaaacttgccacatgacattgtatcgtcttcattttccagaagatgcgttggtgtgccataggtttctaacttccttgaaaatagttttttaagtcaattgtaaatatacgtattattgttaaaagtaactttaaactgcaacacatagcttcaaaacaatatagagattttgtaataccttataagtggagttggctaaaataccttatccatataaaacttattctattctttgcatgcttattttgtgtgttggttgctagcttaaagtttgatttgttgttactctttgtgtgccaaattcactaggcaagcggatttttcctcagacttcaaaaaataattcttttaagaaaaaatgtaaaaatgtttattctaaaaagctgcattaaagggacaacctataaaaagttttgctagctcatctttagaaggaagaaagaatattagcttgggtgatgtttaatttgggtggcgatagtttctgtaggctaaactttatgagaaaagtgtacctactctataaaggtaataaatgtaaaacctcttgctgttattgaggaagctcttcaactaccctaaatttcacaaatgtaacttataacactatgaaaagatttgaccaacaatttacgtttgctgtgtgctttagtttttgtttaagcatattcttttgcttgaatttctgtgttcatgagagttagggtgttttatgcttcttgaactaattttataacatatttaatatattaccagttaagatataaaatcatttgtacatagcgaattgtaaagcagctattaaagtaggtgaaataaagtatatatttgccggttatccatatcttttagaagtcctgacagaacaaccagtttatttgcacataggtagcttctgtttgaaggaaggtaaagttataaggaaactcaaatactataagatgtgtcaaggtatttctccagaattaattgcaaagctagtgctgaaggattttaatcagcttctaaaattttcttctcaataaggcatatgttttgattacttagggaagattcctcatttttatttgccctttatgcatttaatccacatgataggacattaaaaattaatataaagaaaaatcgtgctcatactgtacatctgtttctgtgcttggaactacttgttaatagtttttatcgaagctgtcagcaataagggacataaaactgctgtattatacattgtggaattgaataaacagcctaattttttttttctagtatagggtacttaagcatttccacttttggaagaaaagtgtattagtattttatattgcatttcatttaaaaggacagttttttttttttttttgtaaatccattcattgaaatggtttctaaactgtataatgtaatttggagcctatttagtaatagaattaaatgtcctatgtagtgctacaatttttgaattagaaagtgatcaaatgtaagaaaaaaatttaaaaattcagcccagaaaacaaaatagtgtattaaattagtttaatgtaaaaggaatttataagatttttttcctcaatatagatacctcacttgaaaagaaagcacagcatacttaaagtagttctagtaaacatgtcctagaaaacagttgctaaatgtaggacatcttttgaggaattagtttatgagaaataaaattttacttgtttttactatcctgttagaagtatttgtttatcctgataattttaagccaacatagtagtcttaaattacttttgaatttctaatctgtgaaggcagtaaatgaaatatctgttctgcaactgttgaaacaaataattggctacattgaccataattaaagttaaaattttgccaatgatgtacagttttatggttaaagttgctgtggttggttgcattacatgacacagaaaactgtcctctacctcacgtgaaataaatattttatatggttttactaaaaataagactcatgtatctggtcacctagtttacaaattttgaattatatttattgaaacatgacatactgtgctctgagcttatacctcaattgtattttgtgctgttttccattttcatgccttgtaaataacttgtatagattgtggatcaaatactaaataaaaacttttaatgccaattaaatttgattcaagttaaaa

SEQ ID NO: 869 - protein, 684 aa, Homo Sapiens
MENLQTNFSLVQGSTKKLNGMGDDGSPPAKKMITDIHANGKTINKVPTVKKEHLDDYGEAPVETDGEHVKRTCTSVPETLHLNPSLKHTLAQFHLSSQSSLGGPAAFSARHSQESMSPTVFLPLPSPQVLPGPLLIPSDSSTELTQTVLEGESISCFQVGGEKRLCLPQVLNSVLREFTLQQINTVCDELYIYCSRCTSDQLHILKVLGILPFNAPSCGLITLTDAQRLCNALLRPRTFPQNGSVLPAKSSLAQLKETGSAFEVEHECLGKCQGLFAPQFYVQPDAPCIQCLECCGMFAPQTFVMHSHRSPDKRTCHWGFESAKWHCYLHVNQKYLGTPEEKKLKIILEEMKEKFSMRSGKRNQSKTDAPSGMELQSWYPVIKQEGDHVSQTHSFLHPSYYLYMCDKVVAPNVSLTSAVSQSKELTKTEASKSISRQSEKAHSSGKLQKTVSYPDVSLEEQEKMDLKTSRELCSRLDASISNNSTSKRKSESATCNLVRDINKVGIGLVAAASSPLLVKDVICEDDKGKIMEEVMRTYLKQQEKLNLILQKKQQLQMEVKMLSSSKSMKELTEEQQNLQKELESLQNEHAQRMEEFYVEQKDLEKKLEQIMKQKCTCDSNLEKDKEAEYAGQLAELRQRLDHAEADRQELQDELRQEREARQKLEMMIKELKLQILKSSKTAKE

SEQ ID NO: 870 - DNA, 8051 bp, Homo Sapiens
atcccggggcagccgagggcccctgactcggctcctcgcggcgacatggatcggatggccagctccatgaagcaggtgcccaacccactgcccaaggtgctgagccggcgcggggtcggcgctgggctggaggcggcggagcgcgagagcttcgagcggactcagactgtcagcatcaataaggccattaatacgcaggaagtggctgtaaaggaaaaacacgccagaacgtgcatactgggcacccaccatgagaaaggggcacagaccttctggtctgttgtcaaccgcctgcctctgtctagcaacgcagtgctctgctggaagttctgccatgtgttccacaaactcctccgagatggacacccgaacgtcctgaaggactctctgagatacagaaatgaattgagtgacatgagcaggatgtggggccacctgagcgaggggtatggccagctgtgcagcatctacctgaaactgctaagaaccaagatggagtaccacaccaaaaatcccaggttcccaggcaacctgcagatgagtgaccgccagctggacgaggctggagaaagtgacgtgaacaactttttccagttaacagtggagatgtttgactacctggagtgtgaactcaacctcttccaaacagtattcaactccctggacatgtcccgctctgtgtccgtgacggcagcagggcagtgccgcctcgccccgctgatccaggtcatcttggactgcagccacctttatgactacactgtcaagcttctcttcaaactccactcctgcctcccagctgacaccctgcaaggccaccgggaccgcttcatggagcagtttacaaagttgaaagatctgttctaccgctccagcaacctgcagtacttcaagcggctcattcagatcccccagctgcctgagaacccacccaacttcctgcgagcctcagccctgtcagaacatatcagccctgtggtggtgatccctgcagaggcctcatcccccgacagcgagccagtcctagagaaggatgacctcatggacatggatgcctctcagcagaatttatttgacaacaagtttgatgacatctttggcagttcattcagcagtgatcccttcaatttcaacagtcaaaatggtgtgaacaaggatgagaaggaccacttaattgagcgactatacagagagatcagtggattgaaggcacagctagaaaacatgaagactgagagccagcgggttgtgctgcagctgaagggccacgtcagcgagctggaagcagatctggccgagcagcagcacctgcggcagcaggcggccgacgactgtgaattcctgcgggcagaactggacgagctcaggaggcagcgggaggacaccgagaaggctcagcggagcctgtctgagatagaaaggaaagctcaagccaatgaacagcgatatagcaagctaaaggagaagtacagcgagctggttcagaaccacgctgacctgctgcggaagaatgcagaggtgaccaaacaggtgtccatggccagacaagcccaggtagatttggaacgagagaaaaaagagctggaggattcgttggagcgcatcagtgaccagggccagcggaagactcaagaacagctggaagttctagagagcttgaagcaggaacttgccacaagccaacgggagcttcaggttctgcaaggcagcctggaaacttctgcccagtcagaagcaaactgggcagccgagttcgccgagctagagaaggagcgggacagcctggtgagtggcgcagctcatagggaggaggaattatctgctcttcggaaagaactgcaggacactcagctcaaactggccagcacagaggaatctatgtgccagcttgccaaagaccaacgaaaaatgcttctggtggggtccaggaaggctgcggagcaggtgatacaagacgccctgaaccagcttgaagaacctcctctcatcagctgcgctgggtctgcagatcacctcctctccacggtcacatccatttccagctgcatcgagcaactggagaaaagctggagccagtatctggcctgcccagaagacatcagtggacttctccattccataaccctgctggcccacttgaccagcgacgccattgctcatggtgccaccacctgcctcagagccccacctgagcctgccgactcactgaccgaggcctgtaagcagtatggcagggaaaccctcgcctacctggcctccctggaggaagagggaagccttgagaatgccgacagcacagccatgaggaactgcctgagcaagatcaaggccatcggcgaggagctcctgcccaggggactggacatcaagcaggaggagctgggggacctggtggacaaggagatggcggccacttcagctgctattgaaactgccacggccagaatagaggagatgctcagcaaatcccgagcaggagacacaggagtcaaattggaggtgaatgaaaggatccttggttgctgtaccagcctcatgcaagctattcaggtgctcatcgtggcctctaaggacctccagagagagattgtggagagcggcaggggtacagcatcccctaaagagttttatgccaagaactctcgatggacagaaggacttatctcagcctccaaggctgtgggctggggagccactgtcatggtggatgcagctgatctggtggtacaaggcagagggaaatttgaggagctaatggtgtgttctcatgaaattgctgctagcacagcccagcttgtggctgcatccaaggtgaaagctgataaggacagccccaacctagcccagctgcagcaggcctctcggggagtgaaccaggccactgccggcgttgtggcctcaaccatttccggcaaatcacagatcgaagagacagacaacatggacttctcaagcatgacgctgacacagatcaaacgccaagagatggattctcaggttagggtgctagagctagaaaatgaattgcagaaggagcgtcaaaaactgggagagcttcggaaaaagcactacgagcttgctggtgttgctgagggctgggaagaaggaacagaggcatctccacctacactgcaagaagtggtaaccgaaaaagaatagagccaaaccaacaccccatatgtcagtgtaaatccttgttacctatctcgtgtgtgttatttccccagccacaggccaaatccttggagtcccaggggcagccacaccactgccattacccagtgccgaggacatgcatgacacttccaaagactccctccatagcgacaccctttctgtttggacccatggtcatctctgttcttttcccgcctccctagttagcatccaggctggccagtgctgcccatgagcaagcctaggtacgaagaggggtggtggggggcagggccactcaacagagaggaccaacatccagtcctgctgactatttgacccccacaacaatgggtatccttaatagaggagctgcttgttgtttgttgacagcttggaaagggaagatcttatgccttttcttttctgttttcttctcagtcttttcagtttcatcatttgcacaaacttgtgagcatcagagggctgatggattccaaaccaggacactaccctgagatctgcacagtcagaaggacggcaggagtgtcctggctgtgaatgccaaagccattctccccctctttgggcagtgccatggatttccactgcttcttatggtggttggttgggttttttggttttgtttttttttttaagtttcactcacatagccaactctcccaaagggcacacccctggggctgagtctccagggccccccaactgtggtagctccagcgatggtgctgcccaggcctctcggtgctccatctccgcctccacactgaccaagtgctggcccacccagtccatgctccagggtcaggcggagctgctgagtgacagctttcctcaaaaagcagaaggagagtgagtgcctttccctcctaaagctgaatcccggcggaaagcctctgtccgcctttacaagggagaagacaacagaaagagggacaagagggttcacacagcccagttcccgtgacgaggctcaaaaacttgatcacatgcttgaatggagctggtgagatcaacaacactacttccctgccggaatgaactgtccgtgaatggtctctgtcaagcgggccgtctcccttggcccagagacggagtgtgggagtgattcccaactcctttctgcagacgtctgccttggcatcctcttgaataggaagatcgttccaccttctacgcaattgacaaacccggaagatcagatgcaattgctcccatcagggaagaaccctatacttggtttgctacccttagtatttattactaacctcccttaagcagcaacagcctacaaagagatgcttggagcaatcagaacttcaggtgtgactctagcaaggctcatctttctgcccggctacatcagccttcaagaatcagaagaaaggccaaggtgctggactgttactgacttggatcccaaagcaaggagatcatttggagctcttgggtcagagaaaatgagaaaggacagagccagcggctccaactcctttcagccacatgccccaggctctcgctgccctgtggacaggatgaggacagagggcacatgaacagcttgccagggatgggcagcccaacagcacttttcctcttctagatggaccccagcatttaagtgaccttctgatcttggaaaaacagcgtcttccttctttatctatagcaactcattggtggtagccatcaagcacttcccaggatctgctccaacagaatattgctaggttttgctacatgacgggttgtgagacttctgtttgatcactgtgaaccaacccccatctccctagcccacccccctccccaactccctctctgtgcattttctaagtgggacattcaaaaaactctctcccaggacctcggatgaccatactcagacgtgtgacctccatactgggctaaggaagtatcagcactagaaattgggcagtcttaatgttgaatgctgctttctgcttagtatttttttgattcaaggctcagaaggaatggtgcgtggcttccctgtcccagttgtggcaactaaaccaatcggtgtgttcttgatgcgggtcaacatttccaaaagtggctagtcctcacttctagatctcagccattctaactcatatgttcccaattaccaaggggtggccgggcacagtggctcacgcctgtaatcccagcactttgagaggctgaggtggtaggatcacctgaggtcaggagttcaagaccagcctgtccaacatggtgaaacccccatctctactaaaaataccaaaaattagccgagcgtagtgacgggtgcccgtaatcccagctactcaggaggctgagacaggagaatcacctgaaccccagaggcagaggttgcagtgagctgagatcacgccattgtactccagcctgggcaacaagagcaaaactccgtctcaaaaaaaaaaaaaaattacaaatggggcaaacagtctagtgtaatggatcaaattaagattctctgcccagccgggcacagtggcgcatgcctgtaatcccagaactttgggaggccaagacgggatgattgcttgagctcaggagtttgagaccaggctgggcatcatagcaagacctcatctctactaaaattcaaaaacaaaattagccgggcatgatggtgcatgcctgtagtctcagctagttggggagctaaggtgggagaattgcttgagcttgggaagtcgaggctgcagtcagccctgattgtgccagtgcactccggcctgggtgacagagtgagaccctgtctcaaaaaaaaaaagattctgtgtcagagcccagcccaggagtttgaggctgcaatgagccatgatttcccactgcactccagcctgagtgacagagcgagactccatctctttaaaaacaaacaaaaaattatctgaatgatcctgtctctaaaaagaagccacagaaatgtttaaaaacttcatcgacttagcctgagtcataacggttaagaaagcacttaaacagaagcagaggctaattcagtgtcacatgaggaagtagctgtcagatgtcacataattactttcgtaatagctcagattagaatggctaccccattctctagacaaaatcaaattgtcctattgtgactcttctaaaaatgaagatgaagagctatttaatgacacaccttggattaaaacgggaatcacatcttaaagctaaaaatgaacctgcaagccttctaaatgagtcactgagcatcactagtgacaagtctcgggtgagcgtaaatgggtcatgacaagatgggacagcaacaaaatcatggcttaggatcgacaagaagttaaaaaacagctgcatctgttacttaagtttgtaagacagtgccctgagacctctagagaaaagatgtttgtttacataagagaaagaggccagacatggtgtctcacacgtttaatcccagcactttgggaggcaggggcgggtggatcacctgaggtcaggagttcaagactagcctggccaacatggtgaaaccccgtctctactaaaaatacaaaaattagccgggcatggtggcaggcgcctataatcccagctactggggaggctgaggcaggagaatcacttgaacccgggggacagaggttgtagtgagccaagatcgcaccactgcactccagcctgggtcacagagtgagactccatctcaaaaaaaaaaaagagagagagagagaaagaaatagaagagaagagccatcttggcagggttattttatatctgagcaaggagtttaaatgagactagtttagattgtctgctgatgcagccgtccatagcagtacccctaaaatcccaccagaatacgggtccctctaacccagtggctggaagaaccactgtctagagcaacttttcttggaactgtcccagctaccaagtcagacaccaaggtttatgccaccaggtaacacgggaatcacaggtacatgtcgctccggtcagattagttggctttggcccctcgaccctgtgcaggagctagttctcagcttgcagctggaagttccctcttagctccttagtctagaggggtctcctggctccatttgaccctggtctttaataaccggtcagcatcttgctaccttctaccacctttccaaatctctggaaatcctgccagggaaagcctccagttccaacattggctttccaagcaaactggctttgccctctctctgccatccttgtcctccagagactgcaccacctgtagcatagaaaaccaccaccacggacctgccagccattggcgcagcaaaccagccagctgtttgctgccaaattccttcctctcccaggtccagaccaaatacaagatcagcaccacaccgtggtgttgtcaggagccaaagcaacaggaaacaattcaatgctgttgggttcgattctgagagtagatttttccagacatgtctttcaggtgaccctcaactacctcaggtttgaaggccctaaatgaaactgattaccactcatagggacaaaccgagggggttcggttacatcttggtgataatgcagttgtctcaaacttataacagactctttcacatttcagtttgcagggatagggttgggtttgtttttcttctgtttttaacctttcccctgggtttccattagggtagttccttgaaatgaatttcatttttcactgagtgcctaccttcccagggcaggtggccactggcttctgtttccctccaacaatacttttattatggtattaagacctttctttgtataatacattgcatctgtgttttcaatttttcaaataaatatttccgcctggcaaaaaaaaaaaaaaaaaaaa

SEQ ID NO: 871 - protein, 1037 aa, Homo Sapiens
MDRMASSMKQVPNPLPKVLSRRGVGAGLEAAERESFERTQTVSINKAINTQEVAVKEKHARTCILGTHHEKGAQTFWSVVNRLPLSSNAVLCWKFCHVFHKLLRDGHPNVLKDSLRYRNELSDMSRMWGHLSEGYGQLCSIYLKLLRTKMEYHTKNPRFPGNLQMSDRQLDEAGESDVNNFFQLTVEMFDYLECELNLFQTVFNSLDMSRSVSVTAAGQCRLAPLIQVILDCSHLYDYTVKLLFKLHSCLPADTLQGHRDRFMEQFTKLKDLFYRSSNLQYFKRLIQIPQLPENPPNFLRASALSEHISPVVVIPAEASSPDSEPVLEKDDLMDMDASQQNLFDNKFDDIFGSSFSSDPFNFNSQNGVNKDEKDHLIERLYREISGLKAQLENMKTESQRVVLQLKGHVSELEADLAEQQHLRQQAADDCEFLRAELDELRRQREDTEKAQRSLSEIERKAQANEQRYSKLKEKYSELVQNHADLLRKNAEVTKQVSMARQAQVDLEREKKELEDSLERISDQGQRKTQEQLEVLESLKQELATSQRELQVLQGSLETSAQSEANWAAEFAELEKERDSLVSGAAHREEELSALRKELQDTQLKLASTEESMCQLAKDQRKMLLVGSRKAAEQVIQDALNQLEEPPLISCAGSADHLLSTVTSISSCIEQLEKSWSQYLACPEDISGLLHSITLLAHLTSDAIAHGATTCLRAPPEPADSLTEACKQYGRETLAYLASLEEEGSLENADSTAMRNCLSKIKAIGEELLPRGLDIKQEELGDLVDKEMAATSAAIETATARIEEMLSKSRAGDTGVKLEVNERILGCCTSLMQAIQVLIVASKDLQREIVESGRGTASPKEFYAKNSRWTEGLISASKAVGWGATVMVDAADLVVQGRGKFEELMVCSHEIAASTAQLVAASKVKADKDSPNLAQLQQASRGVNQATAGVVASTISGKSQIEETDNMDFSSMTLTQIKRQEMDSQVRVLELENELQKERQKLGELRKKHYELAGVAEGWEEGTEASPPTLQEVVTEKE

SEQ ID NO: 872 - DNA, 8522 bp, Homo Sapiens
acttccggcgtatgaggcggtgacaatgggagcagcgcgggcggcgccgggaggcagctgacaagcgtttgcggcttcgcttcatggccgctctcccgcccctcctgggatctgtggggagctggggagcccgcagcggcccggagccggagctggcgagccgagcggagacctgtgcgccgcgcctctgaggcgcagcatgtgaagcggagacggcatccagtggggggcgagcctctcagccggccgggatggctaccacggccgagctcttcgaggagccttttgtggcagatgaatatattgaacgtcttgtatggagaaccccaggaggaggctctagaggtggacctgaagcttttgatcctaaaagattattagaagaatttgtaaatcatattcaggaactccagataatggatgaaaggattcagaggaaagtagagaaactagagcaacaatgtcagaaagaagccaaggaatttgccaagaaggtacaagagctgcagaaaagcaatcaggttgccttccaacatttccaagaactagatgagcacattagctatgtagcaactaaagtctgtcaccttggagaccagttagagggggtaaacacacccagacaacgggcagtggaggctcagaaattgatgaaatactttaatgagtttctagatggagaattgaaatctgatgtttttacaaattctgaaaagataaaggaagcagcagacatcattcagaagttgcacctaattgcccaagagttaccttttgatagattttcagaagttaaatccaaaattgcaagtaaataccatgatttagaatgccagctgattcaggagtttaccagtgctcaaagaagaggtgaaatctccagaatgagagaagtagcagcagttttacttcattttaagggttattcccattgtgttgatgtttatataaagcagtgccaggagggtgcttatttgagaaatgatatatttgaagacgctggaatactctgtcaaagagtgaacaaacaagttggagatatcttcagtaatccagaaacagtcctggctaaacttattcaaaatgtatttgaaatcaaactacagagttttgtgaaagagcagttagaagaatgtaggaagtccgatgcagagcaatatctcaaaaatctctatgatctgtatacaagaaccaccaatctttccagcaagctgatggagtttaatttaggtactgataaacagactttcttgtctaagcttatcaaatccattttcatttcctatttggagaactatattgaggtggagactggatatttgaaaagcagaagtgctatgatcctacagcgctattatgattcgaaaaaccatcaaaagagatccattggcacaggaggtattcaagatttgaaggaaagaattagacagcgtaccaacttaccacttgggccaagtatcgatactcatggggagacttttctatcccaagaagtggtggttaatcttttacaagaaaccaaacaagcctttgaaagatgtcataggctctctgatccttctgacttaccaaggaatgccttcagaatttttaccattcttgtggaatttttatgtattgagcatattgattatgctttggaaacaggacttgctggaattccctcttcagattctaggaatgcaaatctttattttttggacgttgtgcaacaggccaatactatttttcatctttttgacaaacagtttaatgatcaccttatgccactaataagctcttctcctaagttatctgaatgccttcagaagaaaaaagaaataattgaacaaatggagatgaaattggatactggcattgataggacattaaattgtatgattggacagatgaagcatattttggctgcagaacagaagaaaacagattttaagccagaagatgaaaacaatgttttgattcaatatactaatgcctgtgtaaaagtctgtgcttacgtaagaaaacaagtggagaagattaaaaattccatggatgggaagaatgtggatacagttttgatggaacttggagtacgttttcatcgacttatctatgagcatcttcaacaatattcctacagttgtatgggtggcatgttggccatttgtgatgtagccgaatataggaagtgtgccaaagacttcaagattccaatggtattacatctttttgatactctgcatgctctttgcaatcttctggtagttgccccagataatttaaagcaagtctgctcaggagaacaacttgctaatctggacaagaatatacttcactccttcgtacaacttcgtgctgattatagatctgcccgccttgctcgacacttcagctgagattgaatttacaaaggaattcagtgtcagttcctttacagaggaatgtcttatacttcagcagccctcggttgatagaaagcacaggagataccttatgacacagccaacattttgtgaaacaatgactggaacaaaacagcagccatacttacctttgaggttttatttaaagtttggataccactagctatattttgcttttttcccctcacattgaattttaattccattcttgaatgtagaaatttcagattctctaaaactacatgtcactgtttttatcctagaaaatgttgctgtcagaaggcaaaggaaatgttaccagtgttttcggttcttgtacttttaacatattccatttagaaattttgccattctgttttccattaataataggtgaaatacaggaaaactacatttgttattcctcagtttttaatgaccttttcagcatcaattgttaatcagattattttaggttttcgtaaataatttttttgcctctttcaaaaggttaacaattaagcatactttctgcagttggttgattggatttttttctgaggtacagcattaatactagtccaaaaaatgtcataaactgaactaaaatgatgaactattttatgtagacattaggagtggatcggaatacttctgctttctgggtaaaacttaaaagtttactatttcttatttggtaaatagattttaagccaattctagtaagaaattaataaaactaccttattttgtatttcacttaaggtggaggaccttaactaaaggaccatatttattcattattttaatattataagggaagtaaaaaaaagtgaggtatagtctaaatggtgcatataggaaatactgacagtgtttagcaacatgcagccctttgagatttctgtcgtaatgctaaacttgaataagatggaatggctgaacatgtggttagtcttttattttaagaagaattgagaattgatagatttggagatgagctttgcaaaggctgtttgcttttcatgtctataggtctgtcattgtcctttttcaaagcatttctgaagttattcctacttggatatagttaatggaattggcttaatttgatgacataataaatcacttataaaattttaaatatcaagtgaaaatttagaaaggccattactattctataaaccttataaacttgctctgggagaatgcattctaaattatatatagtgtttcagctcccattgtggtgttcatagtcttctaggaacagataaacttaagtattcaattcactcttggcattttttctttaatataggctttttagcctatttttggaaaactgcttttcttctgagaaccttattctgaatgtcatcaactttaccaaaccttctaagtccagagctaacttagtactgtttaagttactattgactgaattttcttcattttctgtttagtccagtgttaccaaggtaagctggggaatgaagtataccaacttctttcagagcattttaggacattatggcagctttagaaggctgtcttgtttctagccaagggagagccagcgcaggttttggatactagagaaagtcatttgcttgtactattgccattttagaaagctctgatgtgaattcaaattttacctctgttacttaaagccaacaattttaaggcagtagttttactggccatttaagctctttgtacagtgtcaatttgtaaaaaagaaaaaacgaaaaaaaatctcaaataaaacatgagataacattttaagacttccaaatcagagaagtgcttcaaattattttgtttggattaatttttaaaatgtaaagcatatacttgttgcttagttattttgtttattattttcatgtttgagttctgtgcaatattttctattatgtccgttgataggacagtgacaaaattcgtaagtgaatacttaatttaaaagtgttaacattaatgctcaataaacaaattccctgcagttgttttttttatttcactctttttatattttagagccatccatcctgaattttataaatgattttttatttaaaaatttgagatttttaaaatttttcacagcacaggtcttctcattttcttttttagcaaaaaatacttgactatataaacaagactagaaatttatcctaaacagatggtctttctctgagggaaaaaaaaaaatgtgtcatgtgaggcaatatgcattctttgtattctgattttttaagtgttttcatatttatagccatcacaaaattttgcccaaagtgtatggctcagaagagatgatcaataactaaaatgtttttcgttttgcacatggtaaaattttaggtagagagtggagctttgtataattggtaactttaaccaacatttacgtaagtacggtctttgcagtattacacaataccgcatgagctaatatgcagtatttaggtaatgcattgaatgaagttgaaaatatgctcttaacacactgtgcattgtttttctaaaattgagaaatatctgaaatacagaatacgaatttaataaaggaagcctaccttatgtaaattatgatgttgaaaatgacagtcaaccagagtagatgaagtgtccttatgaagaattattaaatagtagctggatggatctttagatggatgaccacctgaccattccaggacaatttttggtcccattttgaggattgccatagttgcaagtccttaggatcttccttgttttaaaaaactatcaaagtaggttaaattaaaatctaatttaaattaggttaatttatattacattgtagatcattcttttttcccccctctttcacttctaaatattttgctttctaaatactagccttctggttcacagtgaaataatttaattatcaatcagtagattgattccaagtggagaattcactgcttccctaaaatgcgtttttcttacctgtaatggtgaatatttacaaggatctggataaagagattttgatttttgaaatgccacaaaaccccttaaagtggtcaagtacctaaggtagtggctaaggcatgcttgaactgtgtttgagagacagcagttcagtcagtacataatttgttggtgactaacaaagctcacatctgggagattaactttttttaacgcaaaaatattctgcacattacccatatattgttgaattttacatacaaagcattttgtgctttcattcaattagtttaactatattcagtttctgtattatttctctctgatctatcctgtaattattctatactttagaagaaaagatcagttcatattgttagactgaataattctacatgaagttaaaagttagcaatttaaaaaattttgctgcataataaagataattatagttacatgtattgatttaagtctcacacactgtgctaataagtcctttgcacatattattggattctagagcaaccctaggatttgggtactattatttccatttgacagatgaaaaacctaatgcatagaaagataagtagaccagtcaaggtctacagctagtaaaatgctcagattgaaacctaaatcttttctcactcacttttaggttctatatgctattctccttacgtaacgttaaatagatcctttagtttgataggttcattagttttgcttaatcgttgcttccaatatgattcttattgtagtatttatattacaaagttggcatacagggtcaatatctaatttactgttgtgtttttcttaatatgttcaatgtatggtcatactttttaaatttgattttttaaatattataagtggtcatgaaattttaatgttaagtttgtacctaatagaaatatgtctatcacaaatctttattggtattattttatatacttttccagcttgataattttcacaatagaaagagaccaaatattttgtactatattttgtgacatagaagtaaatgacaactctaccttggaagatatgaagaaatcagtgtttttatgttcaaaaactattttaaatgtcataggcttgccaattgtgttaactatttagtacattggtagtttttaaatgactaatgctggagtgaaaatgtaaggcaaaatatttagtatattaacagtagatagtcattttcatgtaatcagaattgcatgttaagggttttaaaagctgtcataactcttaccttttatttctaccagtgatcaatcatttctctttacaaatttagggaggaaacaactgttcaaatgtataggggacagaaacctgacatttagagaacagaaattttaattgccaaattaaagcagctaggctgcccctgggcttaacaaaattcctatttttgaactagacccgaggtattttatcattattatttgataggtaccattaacctttgttttgtgattatcgacttttggggggaaagatgagtaattaaacacactcgcccattttctaagtggtttagaaggttgcagtctgcctcaccatacaaagccagtttaaataggaatatatcacatcatacttcacatagcagtcaacctcagaggaaagtcatttattcagaaggcatagattttgctagacagcagtgatgcattacaaatatataattatttgcactaatatttgagcaggtggaatggattagaacatggtcaacatcatgctgctgataacatgtatttttctatattaatatgtactgtgcaacatgtattaaaattgtcaataattcattttagccaagatactaatatttatattactgtgtttaagagacagtatccaactgagccacttttaatttaaaagtctgaaactggaattaagtttactttcaaaaatcacttaaattactttataatcagtgaaaggtcagtaaaatgtagaattataagtgcctagtgacttaataggaggaaatatggagggttaaggaaggaagtaggaacctggaataagaaagctaagtttcatttatagttccaatgagtgactttctttgttttcaccactgggaatcttaaatgaagaaagtgtcgtatcccttccagttatctttatgttaataaactaagtgaagtttggatagaactaacaaaggaattagtctccattggtggacttccagagttttgagattaaactttgagaggtgagaagccttcctgatgcccctgtaatcttaaattggcaggtgcctctaagtgaggccatccctctttgcctgcctatcattttaatctttatactgtaactggttcctttcaactctggccttttattgtagcacttttatcaagtctgcagcttcccagctacttgggaggctgaggtgggaagaacacttgaagctaggagttcaagaccactctgggcaacatagtgagtccctgtttttagaaaaataaataacctttaggtttttgctatagaaaatatccaaatagagtctggacaatgctggatgtaaagaaaactgtgaagctacctctaagcatattgtttgtgaatactgtgtaccatttagaggataacatgggggattcacatgaagttatgtgaaaatattttataaggaataatacctaagtgcctctcttaagttctccagtagaatgtattttcaatttttgccacaagggggagaagttatttttatagtaatatgtacatttttttattttaaaaatagaattcacacaactttacagcatctatgaacattttgctatcccaattatgtgtgtgtgtgcatgtgtgtaaacaagattctgaaagtcttgcatgagaaaaatttcaaaggaaattaataacaaaaccaaaacagttttgaagaacatgtgcacagtggacacaggaattgaacaaagtttaccatgattaacattatgttttcttagttatatatcacattgaattcctttatcaactctaataagaatctactgattagtgttctacattctgctttttaaagaaaaatttttgaaacaatcagacttaacagaagggttgtaaatactgtacaaataaaatttttcccttttgagaataaaaaaaaaaaaa

SEQ ID NO: 873 - protein, 708 aa, Homo Sapiens
MATTAELFEEPFVADEYIERLVWRTPGGGSRGGPEAFDPKRLLEEFVNHIQELQIMDERIQRKVEKLEQQCQKEAKEFAKKVQELQKSNQVAFQHFQELDEHISYVATKVCHLGDQLEGVNTPRQRAVEAQKLMKYFNEFLDGELKSDVFTNSEKIKEAADIIQKLHLIAQELPFDRFSEVKSKIASKYHDLECQLIQEFTSAQRRGEISRMREVAAVLLHFKGYSHCVDVYIKQCQEGAYLRNDIFEDAGILCQRVNKQVGDIFSNPETVLAKLIQNVFEIKLQSFVKEQLEECRKSDAEQYLKNLYDLYTRTTNLSSKLMEFNLGTDKQTFLSKLIKSIFISYLENYIEVETGYLKSRSAMILQRYYDSKNHQKRSIGTGGIQDLKERIRQRTNLPLGPSIDTHGETFLSQEVVVNLLQETKQAFERCHRLSDPSDLPRNAFRIFTILVEFLCIEHIDYALETGLAGIPSSDSRNANLYFLDVVQQANTIFHLFDKQFNDHLMPLISSSPKLSECLQKKKEIIEQMEMKLDTGIDRTLNCMIGQMKHILAAEQKKTDFKPEDENNVLIQYTNACVKVCAYVRKQVEKIKNSMDGKNVDTVLMELGVRFHRLIYEHLQQYSYSCMGGMLAICDVAEYRKCAKDFKIPMVLHLFDTLHALCNLLVVAPDNLKQVCSGEQLANLDKNILHSFVQLRADYRSARLARHFS

SEQ ID NO: 874 - DNA, 6409 bp, Homo Sapiens
agaggaacagggcaaacctctgacttccggcggcattttgaggcggtcctcctagcggcctgtagtacaaaatgtcaaaaattagaaggaaggtcacagtggaaaataccaagactatatctgatagcacatcccgaagacccagtgtatttgagaggcttggacccagcactggcagtacagcagagacacagtgccgtaactggctgaagactggcaactgcctctatggaaacacatgtagattcgtacatggcccttcacctcgtggtaaaggttatagcagcaattatagaaggtcaccagaaagacctacaggggatcttagagaaagaatgaagaacaagcgccaagacgtggacactgagccccagaaacgaaatacagaggagtcatcctcacctgttaggaaagaatcttcaagagggagacatagggaaaaggaagacataaaaatcactaaggaaagaactccagaaagtgaagaagaaaatgtagaatgggaaactaatagagatgattctgacaatggagatattaattatgattatgttcatgaattgtcattggaaatgaagcgtcagaagatacagagggaattaatgaagctggaacaagaaaacatggagaagagagaagaaattatcattaaaaaggaggtttcaccagaagtggttagatcaaaattgtccccgtcaccttctctaagaaagtctagcaaatctccgaagcgaaaatcaagcccgaagtcgtcttcagctagcaagaaagataggaagacatctgcagtatcttctcccctgttggaccagcagagaaattcaaaaaccaaccaaagtaaaaagaaaggaccacgtactcctagtccaccccctcctataccagaagatatcgctctggggaaaaaatacaaagaaaaatataaagtaaaagacaggatagaagaaaaaacaagagatggaaaggacagaggacgagattttgaacgacaaagagaaaagagagacaagccaaggtctacttccccagcaggacagcatcattctcctatatcttctagacatcactcatcttcctcacaatcaggatcatctattcaaagacattctccttctcctcgtcgaaaaagaactccttcaccatcttatcagcggacactaactccacctttacgacgctctgcctctccttatccttcacattctttgtcgtctccccagagaaagcagagtcctccaagacatcgctctccaatgcgagagaaagggagacatgatcatgaacgaacttcacagtctcatgatcgacgccatgaaaggagggaagatactaggggcaaacgagacagagaaaaggactcaagagaagaacgagaatatgaacaggatcagagctcttctagagaccacagagatgacagagaacctcgagatggtcgggatcggagagatgccagagatactagggaccgaagggaactaagagactccagagacatgcgggactcaagggagatgagagattatagcagagataccaaagagagccgtgatcccagagattctcggtccactcgtgatgcccatgactacagggaccgtgaaggtcgagatactcatcgaaaggaggatacatatccagaagaatcccggagttatggccgaaaccatttgagagaagaaagttctcgtacggaaataaggaatgagtccagaaatgagtctcgaagtgaaattagaaatgaccgaatgggccgaagtagggggagggttcctgagttacctgaaaagggaagtcgaggctcaagaggttctcaaattgatagtcacagtagtaatagcaactatcatgacagctgggaaactcgaagtagctatcctgaaagagatagatatcctgaaagagacaacagagatcaagcaagggattcttcctttgagagaagacatggagagcgagaccgtcgtgacaacagagagagagatcaaagaccaagctcaccaattcgacatcagggaaggaatgacgagcttgagcgtgatgaaagaagagaggaacgaagagtagacagagtggatgataggagagatgaaagggctagagagagagatcgggaacgagaacgagacagggagcgggagagagagagggaacgtgaacgggatcgggaaagagaaaaagagagagaactagaaagagagcgtgctagggaacgggagagagaaagagaaaaagagagagatcgtgaaagggatagagaccgagaccacgatcgagagcgggaaagagagagggaacgagacagggaaaaagaacgggaacgagaaagagaagagagagagagggagagagagcgagaacgggagagagagcgagagcgagaacgggaacgagaaagagcgagagaaagggataaagaacgagaacgccaaagggattgggaagacaaagacaaaggacgagatgaccgcagagaaaagcgagaagagatccgagaagataggaatccaagagatggacatgatgaaagaaaatcaaagaagcgctatagaaatgaagggagtcccagccctagacagtccccgaagcgccggcgtgaacattctccggacagtgatgcctacaacagtggagatgataaaaatgaaaaacacagactcttgagccaagttgtacgacctcaagaatctcgttctcttagtccctcgcacctcacagaagacagacagggtagatggaaagaggaggatcgtaaaccagaaaggaaagagagttcaaggcgctacgaagaacaggaactcaaggagaaagtttcttctgtagataaacagagagaacagacagaaatcctggaaagctcaagaatgcgtgcacaggacattataggacaccaccagtctgaagatcgagagacatctgatcgagctcatgatgaaaacaagaagaaagcaaaaattcaaaagaaaccaattaagaaaaagaaagaggatgatgttggaatagagaggggtaacatagagacaacatctgaagatggtcaagtattttcaccaaaaaaaggacagaaaaagaaaagcattgaaaaaaaacgtaaaaaatccaaaggtgattctgatatttctgatgaagaagcagcccagcaaagtaagaagaaaagaggcccacggactccccctataacaactaaagaggaattggttgaaatgtgcaatggtaagaatggtattctagaggactcccagaaaaaagaagatacagcattcagtgactggtctgatgaggatgtccctgaccgtacagaggtgacagaagcagagcatactgccaccgccacgactcctggtagtaccccttctcctctatcttctcttcttcctcctccaccgcctgtggctactgccactgctacaactgtgcctgcaactcttgctgccactactgctgctgccgccacctctttcagcacatctgccatcactatttccacctctgccacccccaccaataccaccaataatacttttgccaatgaagactcacacagaaaatgccacagaacacgagtagaaaaagtagagacgcctcacgtgactatagaagatgcacagcatcgcaagcctatggatcaaaagaggagcagcagcctcgggagcaatcggagtaaccgtagtcatacgtctggtcgtcttcgctccccatccaatgattcagcccatcgaagtggagatgaccaaagtggtcgaaagagagtactgcacagtggctcaagagatagagaaaaaacaaaaagcctggaaatcacaggagagagaaaatctaggattgatcagttaaagcgtggagaacccagtcgaagtacttcttcagatcgccaggattcaagaagccatagttcaagaagaagttctccagagtcagatcgacaggtccattcaagatctgggtcatttgatagcagagacaggcttcaagaacgagatcgatatgaacacgacagagagcgcgagagagagaggagagatacgaggcagagagaatgggaccgagatgctgataaagattggccacgcaacagggatcgagatagattgcgagaacgagaacgagagagagaacgagacaaaaggagagacttggatagggaaagagagagactaatttctgattctgttgaaagggacagggacagagacagagacagaacttttgagagttctcaaatagagtctgtgaaacgctgtgaagcaaaactggaaggtgaacatgaaagggatctagaaagcacttcccgagactctctagccttggataaagagagaatggataaagatctgggatctgtgcagggatttgaagaaacaaataaatccgagagaactgagagtctggaagcaggagatgacgagtccaagttagatgatgcacattcattaggctctggtgctggagaaggatacgagccaatcagtgatgacgaactagatgaaattctggcaggtgatgcagaaaagagggaggaccaacaggatgaggagaagatgccagatcccttagatgtgatagatgtggattggtctggtcttatgccaaagcatccaaaagaaccacgagagcctggggctgcactcttaaaattcacacctggagctgttatgctaagagttgggatttctaaaaagttggcaggttctgaactctttgccaaagtcaaagaaacatgtcagagacttttagaaaaacccaaaggtagtttcattttactttaactatataatgtctgttaaccatttaagatgccatctgaaggggattctgatctgttcttatgtagcacttaacactgtgtagaaactattttttgagaaatcattttataatcattatttaaccctcatggtcaaagtttctctttaaaatttattttgagaagaagagttatcccacagaaaagttgggaaaagagtacaatgacctttttgtatgaaaattacttattaacaggccaggcgtggtgttgcatgtctgtagtcacagctactcagggaggttgaggcagcaggattgctggagcccaggaaattgaggctgcagtgagccatgattgagccaccacactccaacctaggtgacagagcaagaccctgtctcaaaaaaaaaaaaacaaattaaccaataagttctaatatcaaagtgctcagtggtttgcccttggctaaatgaagcagagccaggaaaaacagactacatatttttcatgtctaaagaaattgggtattttggcagccctttcccctagacatctacccaaatgcaggtgtgtaggttgagtctttaacaaagtgattaagagcttggtctgtaaggccggatgatctggatttcagtaggcacaccacttactggctattacttaatctgtgtgttagtgtcatcatctgtaagtcaggaataatcataccaccaacttcctatggtaattaggagcaaatgagttattacaggcaaaacacttagaacagttcctggcatatagtaatacccaataaatattaactgctactttgaaaatatcctatcacgctgatttttgacctcactgcagcaattttcagttattccagattatctagcttatggattctggtggtaggggttgtttggttttggttttcactgtctctgtctcatctagtacctaccttagtttattttgcaacttactaatactttattaatggggagggacgagtagatggtaaaaagaaggaaaaggaggtaaaaggtgaaaggaacaacattaattaacaattttacgtcatgtccctggacataaaagtttagttagtattaaatttttcactaatacaaaataaaaaaatattgttttatgagttttatgaattcatgcccttcctttactctattagcataagcagtaaatttttttattttaatatagcccaataaacctagagtatacatgtacaaaatacatataattgttaacgtgtattaaccgaaaaatgacccaagacttagttcttgccctactgtatctgccttgtttggttggttctgtgaccttaagcaaataactcctgtgagcctcaattttatttgtaaagtgatggaataaaacccctaaaatcttacccacctctaaagatatttgtttctgtgaccttttgctagtagcatttcaagttaaaatctggtttgattttgctacccatgaaatacagttcggcccttacttattgatgacttaacctaaacagtgaaaatatgcactgtaaagggtggggtgatgtggcttaacaatcagacttcttctatttttgctgctatggtggttgtattagagaactgatgtattatcttgaataaagactttgtcttgtttactgcc

SEQ ID NO: 875 - protein, 1564 aa, Homo Sapiens
MSKIRRKVTVENTKTISDSTSRRPSVFERLGPSTGSTAETQCRNWLKTGNCLYGNTCRFVHGPSPRGKGYSSNYRRSPERPTGDLRERMKNKRQDVDTEPQKRNTEESSSPVRKESSRGRHREKEDIKITKERTPESEEENVEWETNRDDSDNGDINYDYVHELSLEMKRQKIQRELMKLEQENMEKREEIIIKKEVSPEVVRSKLSPSPSLRKSSKSPKRKSSPKSSSASKKDRKTSAVSSPLLDQQRNSKTNQSKKKGPRTPSPPPPIPEDIALGKKYKEKYKVKDRIEEKTRDGKDRGRDFERQREKRDKPRSTSPAGQHHSPISSRHHSSSSQSGSSIQRHSPSPRRKRTPSPSYQRTLTPPLRRSASPYPSHSLSSPQRKQSPPRHRSPMREKGRHDHERTSQSHDRRHERREDTRGKRDREKDSREEREYEQDQSSSRDHRDDREPRDGRDRRDARDTRDRRELRDSRDMRDSREMRDYSRDTKESRDPRDSRSTRDAHDYRDREGRDTHRKEDTYPEESRSYGRNHLREESSRTEIRNESRNESRSEIRNDRMGRSRGRVPELPEKGSRGSRGSQIDSHSSNSNYHDSWETRSSYPERDRYPERDNRDQARDSSFERRHGERDRRDNRERDQRPSSPIRHQGRNDELERDERREERRVDRVDDRRDERARERDRERERDRERERERERERDREREKERELERERAREREREREKERDRERDRDRDHDRERERERERDREKEREREREERERERERERERERERERERERARERDKERERQRDWEDKDKGRDDRREKREEIREDRNPRDGHDERKSKKRYRNEGSPSPRQSPKRRREHSPDSDAYNSGDDKNEKHRLLSQVVRPQESRSLSPSHLTEDRQGRWKEEDRKPERKESSRRYEEQELKEKVSSVDKQREQTEILESSRMRAQDIIGHHQSEDRETSDRAHDENKKKAKIQKKPIKKKKEDDVGIERGNIETTSEDGQVFSPKKGQKKKSIEKKRKKSKGDSDISDEEAAQQSKKKRGPRTPPITTKEELVEMCNGKNGILEDSQKKEDTAFSDWSDEDVPDRTEVTEAEHTATATTPGSTPSPLSSLLPPPPPVATATATTVPATLAATTAAAATSFSTSAITISTSATPTNTTNNTFANEDSHRKCHRTRVEKVETPHVTIEDAQHRKPMDQKRSSSLGSNRSNRSHTSGRLRSPSNDSAHRSGDDQSGRKRVLHSGSRDREKTKSLEITGERKSRIDQLKRGEPSRSTSSDRQDSRSHSSRRSSPESDRQVHSRSGSFDSRDRLQERDRYEHDRERERERRDTRQREWDRDADKDWPRNRDRDRLRERERERERDKRRDLDRERERLISDSVERDRDRDRDRTFESSQIESVKRCEAKLEGEHERDLESTSRDSLALDKERMDKDLGSVQGFEETNKSERTESLEAGDDESKLDDAHSLGSGAGEGYEPISDDELDEILAGDAEKREDQQDEEKMPDPLDVIDVDWSGLMPKHPKEPREPGAALLKFTPGAVMLRVGISKKLAGSELFAKVKETCQRLLEKPKGSFILL

SEQ ID NO: 876 - DNA, 7242 bp, Homo Sapiens
tttcacctcgcggccgtaggctaacgtggaagtcggaccagccggccggcggaagaacctagagcgcgctgcctggcgagtcaggcgcgcggggcggcgttggtggtcttcgcggcgcaactcggcctttcctgggagggagtgatggggcgcaccggggccggggagcgggcgccagtgtagcccgcgcggcgcctggcccggagcgcggcggctgcggcggcggcggcggcgggcgctggaggcctgtgagagccgcagcccggagcgcccggcttcccacgccatggcccccatgggcatccgcctttccccactgggggtggcagtgttttgcctgctggggctcggcgtgctctaccacctctactcgggcttcttggccggccgcttcagcctcttcggcctgggcggcgagcctggcggcggcgcggcggggcccgcggccgcggccgatgggggcaccgtggacttgcgcgagatgctggctgtgtcagtgctggccgcagtccgcggcggcgacgaggtgaggcgcgtccgcgagagcaacgtcctccacgagaagtccaaggggaagacgcgcgagggagccgaggacaagatgaccagcggcgacgtgctgtccaaccgcaagatgttctacctgctcaagaccgccttccccagcgtccagattaatactgaggaacacgtggatgcagctgatcaggaggttatcttgtgggatcataagattcctgaggatatcctaaaggaagtaactactcctaaagaggtaccagcagaaagtgttactgtctggattgacccacttgatgctacacaggaatatacagaggatcttcgaaagtacgtcactactatggtgtgtgtggctgtaaatggtaaacccatgctaggagttatacataagccattttccgaatatacagcttgggcaatggtagatggtggttcaaatgtgaaagcccgctcttcctacaatgagaagaccccaaggatcgttgtgtctcgttcccattcagggatggtcaaacaggtcgctcttcagacttttggaaaccagactacaattatcccagctggtggtgctggttataaagttttagcacttttggatgtgcctgataagagtcaagaaaaagctgatttatacatccatgtgacatacatcaaaaagtgggatatatgtgctggtaatgccatcttaaaagccctaggggggcatatgactaccctgagtggtgaagaaatcagttacactggttcagacggcattgaagggggactccttgctagcatcagaatgaaccaccaggccctggtcagaaaactcccagatctagaaaagacaggacataaatgagcataactgattacagggtacagttcttcacagctgaaatggttagcctgagatgctggaagcttcaaaggattggtggagactatgcatggttaaggccatcccgaactttttaaagtatttatgaagcatcagagacttattttccctgtaatagaatgcaaaatcagggaaaatgggttgctttgtgtctcaagtattgtctttatttttgagactattttcatacagttgtcatacacaaggcgcatatatatatttgtgaattaaaatctgtagctgagtctacattgttatgagtcaccattttcacacaacatcatgaatcttcactgttagtactttcatatagaattcggttgaaggaaagattgatttttgtgtagatgtttaatataactttacaactatatctcattgaaaataaagtcattggggatttttacctctaatttggatggaaagcacaagaagccacacattcattaatatgcaacaaatgttgtatttatgttactgaatatttctatggattaaaatagaaaaagtttaattgattttttcttttaaattttaataacaggttcaccagctggtagaaaatagagacacatgatgatttgcattgtaataatttctgtgtgtatgtgtgtgtgttgttttgtttttataaagaaaagtgtgtttgtacccatgagttcagcatttctgccatcttgctattttcattttccctgtggaagatgcatggttgcatccttttccttctgaccaacacttagtctttaactttgtaaggttcggtttaaggtttcagggttagcactatagttttggttcattttctcattaacgataaaatatgctgtaaggcactataagaatataaatgattctattacaattgaaagttacttgacattacatgaattgaactgcctttcattatcttcagacactttgttttagtatttttttttaatttgctaggtttgtatatagaagatcctttcattatcaagaatgagtatggttgcttttgccatggttgcttttactattaataaatgtatctagcctacccaaactctgtagtaacttttgagattctcttaatttcccctcagattaaaatagagaaggttgaaggtactttttgatgaaatttttttctagtctggttagaaaaaaaaagttgtgacatattcattgtgttaccgtaactagaaccttgctttgtgaactgtctttcattgggatgtatggtttctctcaatgtgaaatctggaaacttcatgtaaactacccatgccgttatttcatgtgactccagtgcccttgtattccataacatgctgatgagagggatttctcacggtttctttctttgctaaattttttaaccataaagcagcttaccctttattttcccatcttggaagtaaaattgaccaaagaatgtacgttctagcctggtggaatgtgcatactttaggtttgtatgttacattgtccaaagccctttactttcttattagtaaactgaatctaatatgacacaaatgttttcacccaatctcttgcaactggtcaaattcgagaaggtgttgggccttagcagtaggccttttcagtgaaaattcattcaaagttttggtaggtggaacacttgatatttaaataggacttgaaaattttgaaaagagtatcagagacctcatttttttcctttgcaataagctgaagaaactttctttttcaggagagatggcaaaggtatatgctgttgccagagtcctgtggtataagcatctgtttttattatagtatgtcaaagttagggaaatgggactggcaagtaaaaaatggaatttaatttcaatgttttatgggaactctgatttaatgggaagcaaactagttcatattagcaggaattattttattttttcgagacagagtttcactctcgttggccaggctggagtgcaatggcgtgatctcggctcaccgcaacctctgcttcccgggttcaagcgattctcctgcctcagcctcccaagtagctgggattacaggcatacaccaccacacccagctaatttttttgtatttttgttagagacagggtttctccatgttggtcaggctggtctcgaactcccgacctcaggtgatccgcccacctcggcctcccaaagtgatgattttatttttatttttaattgtattaatctgcatctagataatgactttgtgaagggtgtgtgttgtgtgcaaaacttaaggtattggttgagagttaaatacattatttttataatatgttgggtatagtctagttactaatgattttttttaagtacttttataaaaagttcatttttaaaattgtttgtttttaaaagccaatatacgttgcagaattaggaacagtatttatatttatttacacaagacattgtgccatagcatcctagtaaaacaccttcatgaatgagtaatgttatctcccagaattacattaaaattatttctaaaaagtagcaaagtcattaccttttgcttttaatgacccacacctcaccagctcctggtcttttcttcactgttgcccttattttgaggcaatttttcttaaaatatgacttttatgcaccacatttagtagaggcagtgacatcagtgatctcagtacccatcagctgtccccctcctctgcccttcttcatctcttctaccttgtgaccatttcccttaccggttcatgttctcctttatctctgcttttctttcttagccaggatacttccctcacaactctcactcccaaattcttttagatatacatttttctggatattggctgctgaaatctgaagctctggtaaagttcctagtatcagagatcaatcctggaggaggcctagttcactattagattacaaagactcctcacaaagtaaaggaaaatcaccttcaaaaccacaaccctttatgttgtcaagtctaatatgagtgtttttacgaagtatttctttctacccattgttcaagaatgtaaatgtaaaaaaaaatacaagagagttgggtagatatgcatgcttgaggaaacttgcttttactgttttcctacttgtatccccagttcagttgaatttacaaggacctacaagatggtcatgtttgtcttggtatgtgctaccccaattttagtgtttctttctttattttaaatcagtaattattcagttgattgtttatactatataatgaagtaacaaaaacattttggtttgtatgttttaagtaacagttgtgcaaattcctcttgtttgttaggtgctccctttgaatattttgtgaactgtgtcagagggagaggggtggtggctaggaagagggtcagaaagaagctagagggaggtcaggagaagggtaacagggaggatgcaaagcagacatctaccctggtcaccccaggatcaggatatctgtccttgtttcatgttgaattcaaaaattggatctcacttaggctttgaaggtgacagccatctctgatagctgagcataagtaaagaaaggtggagtgccgatgcagaaaggaaaatattcagctttcctctcttagatcgcactttgaagatggccttttggagacaatctgacaggttaaaacaggaactgttggaattattctagctgtaactacctattggctatgtgttgattgatcctagaaagaaaaaataatttttcattttagatcttgattgaatttaagatgtatttatatgcctacaaaaggtctgtcttgtaactgttgtataaaataaacctaatctatggtttcatttttaatctaaaaaaagttgtgccttaacaatagggcattgtatgttaataagggaaaacaacctttttagtagatgggggaaaataggaactttttgccattaaaacttaagttcttttgatgtttttaatattatagttgggggagattcattaaaattaaattgaaataaaattatttttgcataacctagcatttacaactaaagtatgttttttataagaactggcatcttgatgtatataggtctgaaataatatttcatcttttgatttttaattttaataatattagaccaggatagatcacagttttacaaatcttagttttaaataaattatttcagtgtgctgttagtcctctacagtcattttggtttaaaaagtgactatttatttatggtagcatatcaataatttattaatgttaaaaaatactgtgtatgacattacaaaccagaacagttcctgggggagaggattctaattgattggcagttctgagagggcaagaagaatggaactttatacttcaaaaggaggttttggttttaccaggtactgcttatgtaaatcgtttatttttatttcatcaaagcctggcaagtatatgcattccaatttaccattggcaaagctttatttatttttaaggttggatgttgaattaattttgtgggaaaatgagatttgtaagtagttttctttctagataagataacataaaccaaactttcagaagttaaggatgatgaataatattgaaatgacttgttatatattgtaagggttcccttaagtatcataattaacaatttgtggaaattgaaaaagcataaactgtgttatttgattagtaatatgttcccttaaaattcattttgaggtgtatgttatacacacagtaaatttttgttcaggaatgacttgctcattctgtgtttttaaaaataggaaataaggcatagtgagtcatcattacatcaattaaccaaaaaatatttcatcccctccgtcactgaaattatctacttcagccacctttcttattctcgtgttaggagggcacgtttatggactttttaatttccatgtgccatattgtccactaccggcagtagccaaagctagctgtttcagtcccacagaagagacagtgctctgccatgatgacagggcactgctagggctggtttttcttgtttttcccttttggcagtgtggacttcaggaactagatgtatatgcacaagggattgagtttacactaaaactaggaaatggagttttcaatctatgttcttgcctcttcatacttttatttattttttgtcatcctgccttatactgggctaacaatgagataaaataaaaatacctttgaatactcttttccctttcatgcatttaaagccatggaggaactagaccattagctgttgccgtcacatgcttagacaccagtttacttagcgtgttatgaccttcctcacccatactaccaaatttaaatgggtcccgacttcaccctctggaaggaagtaaactcttctctccccatggtttcagagcagtttttacctgcaagcaccatctctgtatgtgctcttactagattatacagttcttgagagggattgcatcttagtgtttttgtatttccacctcacccccagcacatagcccagtctcttgcacaaattaagtacttaatgtgtgttgagctaaattgaataaaggattattagcattagcatattttgtgccttggttgtataagctggttgtttgttttgttacctttgcaaatatttatgattatcacccccccacatactaaattgtttttaaaagttttgcctttccttcagatactaccccaggcaatttgctgtagataatgtgattgcttccaatgacataattatcccaaactctctgccccggatatactttgccaaacgaaatttgaattctctgaataaattggtcatgtctaaaagagaaaaaaaaaaaaa

SEQ ID NO: 877 - protein, 359 aa, Homo Sapiens
MAPMGIRLSPLGVAVFCLLGLGVLYHLYSGFLAGRFSLFGLGGEPGGGAAGPAAAADGGTVDLREMLAVSVLAAVRGGDEVRRVRESNVLHEKSKGKTREGAEDKMTSGDVLSNRKMFYLLKTAFPSVQINTEEHVDAADQEVILWDHKIPEDILKEVTTPKEVPAESVTVWIDPLDATQEYTEDLRKYVTTMVCVAVNGKPMLGVIHKPFSEYTAWAMVDGGSNVKARSSYNEKTPRIVVSRSHSGMVKQVALQTFGNQTTIIPAGGAGYKVLALLDVPDKSQEKADLYIHVTYIKKWDICAGNAILKALGGHMTTLSGEEISYTGSDGIEGGLLASIRMNHQALVRKLPDLEKTGHK

SEQ ID NO: 878 - protein, 460 aa, Homo Sapiens
MAPRSRRRRHKKPPSSVAPIIMAPTTIVTPVPLTPSKPGPSIDTLGFFSLDDNVPGLSQLILQKLNMKSYEEYKLVVDGGTPVSGFGFRCPQEMFQRMEDTFRFCAHCRALPSGLSDSKVLRHCKRCRNVYYCGPECQKSDWPAHRRVCQELRLVAVDRLMEWLLVTGDFVLPSGPWPWPPEAVQDWDSWFSMKGLHLDATLDAVLVSHAVTTLWASVGRPRPDPDVLQGSLKRLLTDVLSRPLTLGLGLRALGIDVRRTGGSTVHVVGASHVETFLTRPGDYDELGYMFPGHLGLRVVMVGVDVATGFSQSTSTSPLEPGTIQLSAHRGLYHDFWEEQVETGQTHHPDLVAAFHPGFHSSPDLMEAWLPTLLLLRDYKIPTLITVYSHQELVSSLQILVELDTHITAFGSNPFMSLKPEQVYSSPNKQPVYCSAYYIMFLGSSCQLDNRQLEEKVDGGI

SEQ ID NO: 879 - DNA, 1945 bp, Homo Sapiens
agcggtccgcactcggggaggcgggagggtgacggcggtgctgcgaggtcggcgcgcagctccgccgcgggtcgctcgggcgctgtccaggcggagccggccccgcccgggctgcagccatgatcaagcgtttcctggaggacaccacggatgatggagaactgagcaagttcgtgaaggatttctcaggaaatgcgagctgccacccaccagaggctaagacctgggcatccaggccccaagtcccggagccaaggccccaggccccggacctctatgatgatgacctggagttcagacccccctcgcggccccagtcctctgacaaccagcagtacttctgtgccccagcccctctcagcccatctgccaggccccgcagcccatggggcaagcttgatccctatgattcctctgaggatgacaaggagtatgtgggctttgcaaccctccccaaccaagtccaccgaaagtccgtgaagaaaggctttgactttaccctcatggtggcaggagagtctggcctgggcaaatccacacttgtcaatagcctcttcctcactgatctgtaccgggaccggaaacttcttggtgctgaagagaggatcatgcaaactgtggagatcactaagcatgcagtggacatagaagagaagggtgtgaggctgcggctcaccattgtggacacaccaggttttggggatgcagtcaacaacacagagtgctggaagcctgtggcagaatacattgatcagcagtttgagcagtatttccgagacgagagtggcctgaaccgaaagaacatccaagacaacagggtgcactgctgcctgtacttcatctcacccttcggccatgggtatggtccaagcctgaggctcctggcaccaccgggtgctgtcaagggaacaggccaagagcaccaggggcagggctgccactagcaggtggtcacaggttcctgttccccaggctccggccattggatgttgaattcatgaaggccctgcatcagcgggtcaacatcgtgcctatcctggctaaggcagacacactgacacctcccgaagtggaccacaagaaacgcaaaatccgggaggagattgagcattttggaatcaagatctatcaattcccagactgtgactctgatgaggatgaggacttcaaattgcaggaccaagccctaaaggaaagcatcccatttgcagtaattggcagcaacactgtagtagaggccagagggcggcgagttcggggtcgactctacccctggggcatcgtggaagtggaaaacccagggcactgcgactttgtgaagctgaggacaatgctggtacgtacccacatgcaggacctgaaggatgtgacacgggagacacattatgagaactaccgggcacagtgcatccagagcatgacccgcctggtggtgaaggaacggaatcgcaagtatgaccagaagccaggacaaagctggcagggggagatcccaagcctagccttgggtgagaccaagccctacttttgttcttctataggccctgggctcaatctaagcgggtgctggggtcctcctcgccttatcaacccttttctccctttagcaaactgactcgggaaagtggtaccgacttccccatccctgctgtcccaccagggacagatccagaaactgagaagcttatccgagagaaagatgaggagctgcggcggatgcaggagatgctacacaaaatacaaaaacagatgaaggagaactattaactggctttcagccctggatatttaaatctcctcctcttcttcctgtccatgccggcccctcccagcaccagctctgctcaggccccttcagctactgccacttcgccttacatccctgctgactgcccagagactcagaggaaataaagtttaataaatctgtaggtggcttctggaa

SEQ ID NO: 880 - protein, 274 aa, Homo Sapiens
MIKRFLEDTTDDGELSKFVKDFSGNASCHPPEAKTWASRPQVPEPRPQAPDLYDDDLEFRPPSRPQSSDNQQYFCAPAPLSPSARPRSPWGKLDPYDSSEDDKEYVGFATLPNQVHRKSVKKGFDFTLMVAGESGLGKSTLVNSLFLTDLYRDRKLLGAEERIMQTVEITKHAVDIEEKGVRLRLTIVDTPGFGDAVNNTECWKPVAEYIDQQFEQYFRDESGLNRKNIQDNRVHCCLYFISPFGHGYGPSLRLLAPPGAVKGTGQEHQGQGCH

SEQ ID NO: 881 - DNA, 2873 bp, Homo Sapiens
cggcacgcccgggaggctttctctggctggtaaccgctactcccggacaccagaccaccgccttccgtacacaggggcccgcatcccaccctcccggacctaagagcctgggtcccctgtttccggaggtccgcttcccggcccccagattctggcatcccagccctcagtgtccaagacccaggcagcccgggtccccgcctcccggatccaggcgtccgggatctgcgccaccagaacctagcctcctgcagacctccgccatctgggggcactcaacctcctggagccaagggccccacgtcccacccagagaaactctcgtattcccagctcctagggccaaggaacccgggcgctccgaactcccagctttcggacatctggcacacggggcagagcagagaagcctcagcgcccagcctggggaatttaaacactccagcttccaagagccaaggaacttcagtgctgtgaactcacaactctaaggagccctccaaagttccagtctccaggtgctgttactcaactcagtcctaggaacgtcgggtcctgggaaggagcccaagcgctcccagccagcttccaggcgctaagaaaccccggtgcttcccatcatggtggccgatcctcctcgagactccaaggggctcgcagcggcggagcccaccgccaacgggggcctggcgctggcctccatcgaggaccaaggcgcggcagcaggcggctactgcggttcccgggaccaggtgcgccgctgccttcgagccaacctgcttgtgctgctgacagtggtggccgtggtggccggcgtggcgctgggactgggggtgtcgggggccgggggtgcgctggcgttgggcccggagcgcttgagcgccttcgtcttcccgggcgagctgctgctgcgtctgctgcggatgatcatcttgccgctggtggtgtgcagcttgatcggcggcgccgccagcctggaccccggcgcgctcggccgtctgggcgcctgggcgctgctctttttcctggtcaccacgctgctggcgtcggcgctcggagtgggcttggcgctggctctgcagccgggcgccgcctccgccgccatcaacgcctccgtgggagccgcgggcagtgccgaaaatgcccccagcaaggaggtgctcgattcgttcctggatcttgcgagaaatatcttcccttccaacctggtgtcagcagcctttcgctcatactctaccacctatgaagagaggaatatcaccggaaccagggtgaaggtgcccgtggggcaggaggtggaggggatgaacatcctgggcttggtagtgtttgccatcgtctttggtgtggcgctgcggaagctggggcctgaaggggagctgcttatccgcttcttcaactccttcaatgaggccaccatggttctggtctcctggatcatgtggtacgcccctgtgggcatcatgttcctggtggctggcaagatcgtggagatggaggatgtgggtttactctttgcccgccttggcaagtacattctgtgctgcctgctgggtcacgccatccatgggctcctggtactgcccctcatctacttcctcttcacccgcaaaaacccctaccgcttcctgtggggcatcgtgacgccgctggccactgcctttgggacctcttccagttccgccacgctgccgctgatgatgaagtgcgtggaggagaataatggcgtggccaagcacatcagccgtttcatcctgcccatcggcgccaccgtcaacatggacggtgccgcgctcttccagtgcgtggccgcagtgttcattgcacagctcagccagcagtccttggacttcgtaaagatcatcaccatcctggtcacggccacagcgtccagcgtgggggcagcgggcatccctgctggaggtgtcctcactctggccatcatcctcgaagcagtcaacctcccggtcgaccatatctccttgatcctggctgtggactggctagtcgaccggtcctgtaccgtcctcaatgtagaaggtgacgctctgggggcaggactcctccaaaattacgtggaccgtacggagtcgagaagcacagagcctgagttgatacaagtgaagagtgagctgcccctggatccgctgccagtccccactgaggaaggaaaccccctcctcaaacactatcgggggcccgcaggggatgccacggtcgcctctgagaaggaatcagtcatgtaaaccccgggagggaccttccctgccctgctgggggtgctctttggacactggattatgaggaatggataaatggatgagctagggctctgggggtctgcctgcacactctggggagccaggggccccagcaccctccaggacaggagatctgggatgcctggctgctggagtacatgtgttcacaagggttactcctcaaaacccccagttctcactcatgtccccaactcaaggctagaaaacagcaagatggagaaataatgttctgctgcgtccccaccgtgacctgcctggcctcccctgtctcagggagcaggtcacaggtcaccatggggaattctagcccccactggggggatgttacaacaccatgctggttattttggcggctgtagttgtggggggatgtgtgtgtgcacgtgtgtgtgtgtgtgtgtgtgtgtgtgtgtgtgtgtgttctgtgacctcctgtccccatggtacgtcccaccctgtccccagatcccctattccctccacaataacagaaacactcccagggactctggggagaggctgaggacaaatacctgctgtcactccagaggacattttttttagcaataaaattgagtgtcaactatttaa

SEQ ID NO: 882 - protein, 541 aa, Homo Sapiens
MVADPPRDSKGLAAAEPTANGGLALASIEDQGAAAGGYCGSRDQVRRCLRANLLVLLTVVAVVAGVALGLGVSGAGGALALGPERLSAFVFPGELLLRLLRMIILPLVVCSLIGGAASLDPGALGRLGAWALLFFLVTTLLASALGVGLALALQPGAASAAINASVGAAGSAENAPSKEVLDSFLDLARNIFPSNLVSAAFRSYSTTYEERNITGTRVKVPVGQEVEGMNILGLVVFAIVFGVALRKLGPEGELLIRFFNSFNEATMVLVSWIMWYAPVGIMFLVAGKIVEMEDVGLLFARLGKYILCCLLGHAIHGLLVLPLIYFLFTRKNPYRFLWGIVTPLATAFGTSSSSATLPLMMKCVEENNGVAKHISRFILPIGATVNMDGAALFQCVAAVFIAQLSQQSLDFVKIITILVTATASSVGAAGIPAGGVLTLAIILEAVNLPVDHISLILAVDWLVDRSCTVLNVEGDALGAGLLQNYVDRTESRSTEPELIQVKSELPLDPLPVPTEEGNPLLKHYRGPAGDATVASEKESVM

SEQ ID NO: 883 - DNA, 5565 bp, Homo Sapiens
ggcgcggcgctcgcggctgctgcctgggagggaggccgggcaggcggctgagcggcgcggctctcaacgtgacggggaagtggttcgggcggccgcggcttactaccccagggcgaacggacggacgacggaggcgggagccggtagccgagccgggcgacctagagaacgagcgggtcaggctcagcgtcggccactctgtcggtccgctgaatgaagtgcccgcccctctaagcccggagcccggcgctttccccgcaagatggacggtttcgccggcagtctcgatgatagtatttctgctgcaagtacttctgatgttcaagatcgcctgtcagctcttgagtcacgagttcagcaacaagaagatgaaatcactgtgctaaaggcggctttggctgatgttttgaggcgtcttgcaatctctgaagatcatgtggcctcagtgaaaaaatcagtctcaagtaaaggccaaccaagccctcgagcagttattcccatgtcctgtataaccaatggaagtggtgcaaacagaaaaccaagtcataccagtgctgtctcaattgcaggaaaagaaactctttcatctgctgctaaaagtggtacagaaaaaaagaaagaaaaaccacaaggacagagagaaaaaaaagaggaatctcattctaatgatcaaagtccacaaattcgagcatcaccttctccccagccctcttcacaacctctccaaatacacagacaaactccagaaagcaagaatgctactcccaccaaaagcataaaacgaccatcaccagctgaaaagtcacataattcttgggaaaattcagatgatagccgtaataaattgtcgaaaataccttcaacacccaaattaataccaaaagttaccaaaactgcagacaagcataaagatgtcatcatcaaccaagaaggagaatatattaaaatgtttatgcgcggtcggccaattaccatgttcattccttccgatgttgacaactatgatgacatcagaacggaactgcctcctgagaagctcaaactggagtgggcatatggttatcgaggaaaggactgtagagctaatgtttaccttcttccgaccggggaaatagtttatttcattgcatcagtagtagtactatttaattatgaggagagaactcagcgacactacctgggccatacagactgtgtgaaatgccttgctatacatcctgacaaaattaggattgcaactggacagatagctggcgtggataaagatggaaggcctctacaaccccacgtcagagtgtgggattctgttactctatccacactgcagattattggacttggcacttttgagcgtggagtaggatgcctggatttttcaaaagcagattcaggtgttcatttatgtgttattgatgactccaatgagcatatgcttactgtatgggactggcagaagaaagcaaaaggagcagaaataaagacaacaaatgaagttgttttggctgtggagtttcacccaacagatgcaaataccataattacatgcggtaaatctcatattttcttctggacctggagcggcaattcactaacaagaaaacagggaatttttgggaaatatgaaaagccaaaatttgtgcagtgtttagcattcttggggaatggagatgttcttactggagactcaggtggagtcatgcttatatggagcaaaactactgtagagcccacacctgggaaaggacctaaaggtgtatatcaaatcagcaaacaaatcaaagctcatgatggcagtgtgttcacactttgtcagatgagaaatgggatgttattaactggaggagggaaagacagaaaaataattctgtgggatcatgatctgaatcctgaaagagaaatagaggttcctgatcagtatggcacaatcagagctgtagcagaaggaaaggcagatcaatttttagtaggcacatcacgaaactttattttacgaggaacatttaatgatggcttccaaatagaagtacagggtcatacagatgagctttggggtcttgccacacatcccttcaaagatttgctcttgacatgtgctcaggacaggcaggtgtgcctgtggaactcaatggaacacaggctggaatggaccaggctggtagatgaaccaggacactgtgcagattttcatccaagtggcacagtggtggccataggaacgcactcaggcaggtggtttgttctggatgcagaaaccagagatctagtttctatccacacagacgggaatgaacagctctctgtgatgcgctactcaatagatggtaccttcctggctgtaggatctcatgacaactttatttacctctatgtagtctctgaaaatggaagaaaatatagcagatatggaaggtgcactggacattccagctacatcacacaccttgactggtccccagacaacaagtatataatgtctaactcgggagactatgaaatattgtactgggacattccaaatggctgcaaactaatcaggaatcgatcggattgtaaggacattgattggacgacatatacctgtgtgctaggatttcaagtatttggtgtctggccagaaggatctgatgggacagatatcaatgcactggtgcgatcccacaatagaaaggtgatagctgttgccgatgacttttgtaaagtccatctgtttcagtatccctgctccaaagcaaaggctcccagtcacaagtacagtgcccacagcagccatgtcaccaatgtcagttttactcacaatgacagtcacctgatatcaactggtggaaaagacatgagcatcattcagtggaaacttgtggaaaagttatctttgcctcagaatgagactgtagcggatactactctaaccaaagcccccgtctcttccactgaaagtgtcatccaatctaatactcccacaccgcctccttctcagcccttaaatgagacagctgaagaggaaagtagaataagcagttctcccacacttctggagaacagcctggaacaaactgtggagccaagtgaagaccacagcgaggaggagagtgaagagggcagcggagaccttggtgagcctctttatgaagagccatgcaacgagataagcaaggagcaggccaaagccacccttctggaggaccagcaagacccttcgccctcgtcctaacaccctggcttcagtgcaactcttttccttcagctgcatgtgattttgtgataaagttcaggtaacaggatgggcagtgatggagaatcactgttgattgagattttggtttccatgtgatttgttttcttcaatagtcttattttcagtctctcaaatacagccaacttaaagttttagtttggtgtttattgaaaattaaccaaacttaatactaggagaagactgaatcattaatgatgtctcacaaattactgtgtacctaagtggtgtgatgtaaatactggaaacaaaaacagcagttgcattgattttgaaaacaaacccccttgttatctgaacatgttttcttcaggaacaaccagaggtatcacaaacactgttactcatctactggctcagactgtactacttttttttttttttttcctgaaaaagaaaccagaaaaaaatgtactcttactgagataccctctcaccccaaatgtgtaatggaaaatttttaattaagaaaaacttcagttttgccaagtgcaatggtgttgccttctttaaaaaatgccgttttcttacactaccagtggatgtccagacatgctcttagtctactagagaggtgctgccttttctaagtcataatgaggaacagtcccttaatttcttgtgtgcaactctgttttatcctagaactaagagagcattggtttgttaaagagctttcaatgtatattaaaaccttcaatactcagaaatgatggattcctccaaggagtcctttactagcctaaacattctcaaatgtttgagattcaagtgaatggaaggaaaaccacatgcctttaaaactaaactgtaataattacctggctaatttcagctaagccttcatcataatttgttccctcagtaataggagaaatataaatacagtaagtttagattattgaattggtgcttgaaatttattggttttgttgtaattttatacagattatatgagggataagatactcatcaaattgcaaattcttttttttacagaagtgtgggtaacagtcacagcagttttttttaccaacagcatacttaacagacttgctgtgtagcagtttttttctggtggagttgctgtaagtcttgtaagtctaatgtggctatcctactcttttgggcaatgcatgtattatgcattggaaaggtattttttttaagttctgttggctagctatggttttcagtacatttcctactttaagagtaattactgacaaatatgtatttcctatatgtttatactttgattataaaaaagtattttgttttgattttttaacttgctgcattgttttgatactttctatttttttggtcaaatcatgtttagaaactttggatgagttaagaagtcttaagtatgcaggcgtttacgtgattgtgccattccaaagtgcatcagaactgtcattcccttctaatatcttctcaggagtaatacaaatcaggtatttcatcatcatttggtaatatgaaaactccagtgaactcccaaggacatttacaacatttatattcacacgctgtatggaagggtgtgggtgtgtgtgaaggggcgagtggagacactgtgtgtatctctagataagaagatatgcaccacgttgaaaatactcagtgtagatctctatgtgtataggtatctgtatatctttccttttgtttacaactgttaaaaaacctcaaaatagttctcttcaaaagaagagagattccaagcaacccatctttcttcagtatgtatgttctgtacatacttatcggagcgcgccagtaagtatcaggcatatatatctgtctgttagcaatgattattacatcatcagatcagcatgtgctatactccctgcaagaaatatactgacatgaacaggcagttcttggagaagaaagagcatttctttaagtacctggggaatacagctctcagtgatcagcagggagtttatttgaggacatcagtcacctttggggttgccatgtacaatgagatttataatcatgatactcttcggtggtagtttcaaaagacactactaatacgcaggaagcgttccagctatttaatgctggcaactactgtttaatggtcagttaaatctgtgataatggttggaagtgggtggggttatgaaattgtagatgtttttagaaaaacttgtgaatgaaaatgaatccaagtgtttcatgtgaagatgttgagccattgctatcatgcattcctgtctcatggcagaaaattttgaagattaaaaaataaaataatcaaaatgtttcctctttctaaaaaaaaaaaaaaaaaa

SEQ ID NO: 884 - protein, 981 aa, Homo Sapiens
MDGFAGSLDDSISAASTSDVQDRLSALESRVQQQEDEITVLKAALADVLRRLAISEDHVASVKKSVSSKGQPSPRAVIPMSCITNGSGANRKPSHTSAVSIAGKETLSSAAKSGTEKKKEKPQGQREKKEESHSNDQSPQIRASPSPQPSSQPLQIHRQTPESKNATPTKSIKRPSPAEKSHNSWENSDDSRNKLSKIPSTPKLIPKVTKTADKHKDVIINQEGEYIKMFMRGRPITMFIPSDVDNYDDIRTELPPEKLKLEWAYGYRGKDCRANVYLLPTGEIVYFIASVVVLFNYEERTQRHYLGHTDCVKCLAIHPDKIRIATGQIAGVDKDGRPLQPHVRVWDSVTLSTLQIIGLGTFERGVGCLDFSKADSGVHLCVIDDSNEHMLTVWDWQKKAKGAEIKTTNEVVLAVEFHPTDANTIITCGKSHIFFWTWSGNSLTRKQGIFGKYEKPKFVQCLAFLGNGDVLTGDSGGVMLIWSKTTVEPTPGKGPKGVYQISKQIKAHDGSVFTLCQMRNGMLLTGGGKDRKIILWDHDLNPEREIEVPDQYGTIRAVAEGKADQFLVGTSRNFILRGTFNDGFQIEVQGHTDELWGLATHPFKDLLLTCAQDRQVCLWNSMEHRLEWTRLVDEPGHCADFHPSGTVVAIGTHSGRWFVLDAETRDLVSIHTDGNEQLSVMRYSIDGTFLAVGSHDNFIYLYVVSENGRKYSRYGRCTGHSSYITHLDWSPDNKYIMSNSGDYEILYWDIPNGCKLIRNRSDCKDIDWTTYTCVLGFQVFGVWPEGSDGTDINALVRSHNRKVIAVADDFCKVHLFQYPCSKAKAPSHKYSAHSSHVTNVSFTHNDSHLISTGGKDMSIIQWKLVEKLSLPQNETVADTTLTKAPVSSTESVIQSNTPTPPPSQPLNETAEEESRISSSPTLLENSLEQTVEPSEDHSEEESEEGSGDLGEPLYEEPCNEISKEQAKATLLEDQQDPSPSS

SEQ ID NO: 885 - DNA, 3740 bp, Homo Sapiens
gggacggcggcggcgcagctcggaacccgccagggtccagggtccaggttccagcgcccggcggcccaggcaccccccgagcccagctccacacaccgttcctggatctcctctccccaggcggagcgtgcccctgcccagtccagtgaccttcgcctgttggagccctggttaatttttgcccagtctgcctgttgtggggctcctcccctttggggatataagcccggcctggggctgctccgttctctgcctggcctgaggctccctgagccgcctccccaccatcaccatggccaagggcttctatatttccaagtccctgggcatcctggggatcctcctgggcgtggcagccgtgtgcacaatcatcgcactgtcagtggtgtactcccaggagaagaacaagaacgccaacagctcccccgtggcctccaccaccccgtccgcctcagccaccaccaaccccgcctcggccaccaccttggaccaaagtaaagcgtggaatcgttaccgcctccccaacacgctgaaacccgattcctaccgggtgacgctgagaccgtacctcacccccaatgacaggggcctgtacgtttttaagggctccagcaccgtccgtttcacctgcaaggaggccactgacgtcatcatcatccacagcaagaagctcaactacaccctcagccaggggcacagggtggtcctgcgtggtgtgggaggctcccagccccccgacattgacaagactgagctggtggagcccaccgagtacctggtggtgcacctcaagggctccctggtgaaggacagccagtatgagatggacagcgagttcgagggggagttggcagatgacctggcgggcttctaccgcagcgagtacatggagggcaatgtcagaaaggtggtggccactacacagatgcaggctgcagatgcccggaagtccttcccatgcttcgatgagccggccatgaaggccgagttcaacatcacgcttatccaccccaaggacctgacagccctgtccaacatgcttcccaaaggtcccagcaccccacttccagaagaccccaactggaatgtcactgagttccacaccacgcccaagatgtccacgtacttgctggccttcattgtcagtgagttcgactacgtggagaagcaggcatccaatggtgtcttgatccggatctgggcccggcccagtgccattgcggcgggccacggcgattatgccctgaacgtgacgggccccatccttaacttctttgctggtcattatgacacaccctacccactcccaaaatcagaccagattggcctgccagacttcaacgccggcgccatggagaactggggactggtgacctaccgggagaactccctgctgttcgaccccctgtcctcctccagcagcaacaaggagcgggtggtcactgtgattgctcatgagctggcccaccagtggttcgggaacctggtgaccatagagtggtggaatgacctgtggctgaacgagggcttcgcctcctacgtggagtacctgggtgctgactatgcggagcccacctggaacttgaaagacctcatggtgctgaatgatgtgtaccgcgtgatggcagtggatgcactggcctcctcccacccgctgtccacacccgcctcggagatcaacacgccggcccagatcagtgagctgtttgacgccatctcctacagcaagggcgcctcagtcctcaggatgctctccagcttcctgtccgaggacgtattcaagcagggcctggcgtcctacctccacacctttgcctaccagaacaccatctacctgaacctgtgggaccacctgcaggaggctgtgaacaaccggtccatccaactccccaccaccgtgcgggacatcatgaaccgctggaccctgcagatgggcttcccggtcatcacggtggataccagcacggggaccctttcccaggagcacttcctccttgaccccgattccaatgttacccgcccctcagaattcaactacgtgtggattgtgcccatcacatccatcagagatggcagacagcagcaggactactggctgatagatgtaagagcccagaacgatctcttcagcacatcaggcaatgagtgggtcctgctgaacctcaatgtgacgggctattaccgggtgaactacgacgaagagaactggaggaagattcagactcagctgcagagagaccactcggccatccctgtcatcaatcgggcacagatcattaatgacgccttcaacctggccagtgcccataaggtccctgtcactctggcgctgaacaacaccctcttcctgattgaagagagacagtacatgccctgggaggccgccctgagcagcctgagctacttcaagctcatgtttgaccgctccgaggtctatggccccatgaagaactacctgaagaagcaggtcacacccctcttcattcacttcagaaataataccaacaactggagggagatcccagaaaacctgatggaccagtacagcgaggttaatgccatcagcaccgcctgctccaacggagttccagagtgtgaggagatggtctctggccttttcaagcagtggatggagaaccccaataataacccgatccaccccaacctgcggtccaccgtctactgcaacgctatcgcccagggcggggaggaggagtgggacttcgcctgggagcagttccgaaatgccacactggtcaatgaggctgacaagctccgggcagccctggcctgcagcaaagagttgtggatcctgaacaggtacctgagctacaccctgaacccggacttaatccggaagcaggacgccacctctaccatcatcagcattaccaacaacgtcattgggcaaggtctggtctgggactttgtccagagcaactggaagaagctttttaacgattatggtggtggctcgttctccttctccaacctcatccaggcagtgacacgacgattctccaccgagtatgagctgcagcagctggagcagttcaagaaggacaacgaggaaacaggcttcggctcaggcacccgggccctggagcaagccctggagaagacgaaagccaacatcaagtgggtgaaggagaacaaggaggtggtgctccagtggttcacagaaaacagcaaatagtccccagcccttgaagtcacccggcccccatgcaaggtgcccacatgtgtccatcccagcggctggtgcagggcctccattcctggagcccgaggcaccagtgtcctcccctcaaggacaaagtctccagcccacgttctctctgcctgtgagccagtctagttcctgatgacccaggctgcctgagcacctcccagcccctgcccctcatgccaaccccgccctaggcctggcatggcacctgtcgcccagtgccctggggctgatctcagggaagcccagctccagggccagatgagcagaagctctcgatggacaatgaacggccttgctgggggccgccctgtaccctctttcacctttccctaaagaccctaaatctgaggaatcaacagggcagcagatctgtatatttttttctaagagaaaatgtaaataaaggatttctagatgaaaaaaaaaaaaaaaaaaaaaaaaaaaaaaaaaaaaaaaaaaaaaaaaaaaaaaaaaaaaaaaaaaaaaaaaaaaaaaaaaaaaaaaaaaa

SEQ ID NO: 886 - protein, 967 aa, Homo Sapiens
MAKGFYISKSLGILGILLGVAAVCTIIALSVVYSQEKNKNANSSPVASTTPSASATTNPASATTLDQSKAWNRYRLPNTLKPDSYRVTLRPYLTPNDRGLYVFKGSSTVRFTCKEATDVIIIHSKKLNYTLSQGHRVVLRGVGGSQPPDIDKTELVEPTEYLVVHLKGSLVKDSQYEMDSEFEGELADDLAGFYRSEYMEGNVRKVVATTQMQAADARKSFPCFDEPAMKAEFNITLIHPKDLTALSNMLPKGPSTPLPEDPNWNVTEFHTTPKMSTYLLAFIVSEFDYVEKQASNGVLIRIWARPSAIAAGHGDYALNVTGPILNFFAGHYDTPYPLPKSDQIGLPDFNAGAMENWGLVTYRENSLLFDPLSSSSSNKERVVTVIAHELAHQWFGNLVTIEWWNDLWLNEGFASYVEYLGADYAEPTWNLKDLMVLNDVYRVMAVDALASSHPLSTPASEINTPAQISELFDAISYSKGASVLRMLSSFLSEDVFKQGLASYLHTFAYQNTIYLNLWDHLQEAVNNRSIQLPTTVRDIMNRWTLQMGFPVITVDTSTGTLSQEHFLLDPDSNVTRPSEFNYVWIVPITSIRDGRQQQDYWLIDVRAQNDLFSTSGNEWVLLNLNVTGYYRVNYDEENWRKIQTQLQRDHSAIPVINRAQIINDAFNLASAHKVPVTLALNNTLFLIEERQYMPWEAALSSLSYFKLMFDRSEVYGPMKNYLKKQVTPLFIHFRNNTNNWREIPENLMDQYSEVNAISTACSNGVPECEEMVSGLFKQWMENPNNNPIHPNLRSTVYCNAIAQGGEEEWDFAWEQFRNATLVNEADKLRAALACSKELWILNRYLSYTLNPDLIRKQDATSTIISITNNVIGQGLVWDFVQSNWKKLFNDYGGGSFSFSNLIQAVTRRFSTEYELQQLEQFKKDNEETGFGSGTRALEQALEKTKANIKWVKENKEVVLQWFTENSK

SEQ ID NO: 887 - DNA, 2944 bp, Homo Sapiens
gtgcctacactggtcccacaggttttcagctgtggagtttgggatctgagcttggagcccatttgtttctggcagttccgctcatattttccacttgaagacatcgcctcccttccttccaagctgggagaccagaagtcaacaacaggagggtggagaggccgggtctcacaatccgcttggctggggagtccactgaggttcttgcatcctgaagcaaaccatggagagctggtggggacttccctgtcttgcgttcctgtgttttctaatgcacgcccgaggtcaaagagactttgatttggcagatgcccttgatgaccctgaacccaccaagaagccaaactcagatatctacccaaagccaaaaccaccttactacccacagcccgagaatcccgacagcggtggaaatatctacccaaggccaaagccacgccctcaaccccagcctggcaattccggcaacagtggaggttacttcaatgatgtggaccgtgatgacggacgctacccgcccaggcccaggccacggccgcctgcaggaggtggcggcggtggctactccagttatggcaactccgacaacacgcacggaagagggggctatagactcaactctcgttatggaaatacttatggtggagatcaccattcaacgtatggcaatccagaaggcaatatggtagcaaaaatcgtgtctcccatcgtatccgtggtggtggtgacactgctgggagcagcagccagttatttcaaactaaacaataggagaaattgtttcaggacccatgaaccagaaaatgtctgaagatgttaagatcccctgattactttgagaaaaacaactaaaacaagaaccgtgtttatcactgttgtggagatttccttttattcttgacacaatttgatgacctaaagtgtgttttcttctgtgtaaagtacatgagctgcctcactaagcattcccaactcattgaatgtgatgtggttataaagataagttaggcagctagaccctgcgttctaaaaaaggattgcttgcaatgttggtttggctattcatttgcacaaagagactgtggctctctgttgtgagatcttcagctacctcatggtgcaataacacacacacgcttaaccatgttgatggcacaaagcggtgagcagtagggaggtagaatatcttggtggggaggggatgttatcagcttctgggagatgaagaatattgttgaggttccaaagatgctggacctgtgctaaattcttcagtgatatgaaaaaatcattgagcattcattattgcgaatgaagtggggatgcattatttctgacacccacaagcagggtttgatcatcctttcagctttgagatatctgcacataaaattattattacctgaagaaaataaggctgcattttgaaatgttaagtgcaaaatgactgatgttaaaaccatctgggggaaatcttgggatgctttttcctaggaaatcatatggttgtgatatgttttggcgcataggagacagaaatagtgattatcaggcgttgagcctttttgtagtatttttagtctttgatactctgtaagtgctagttcctaaggcaccaacattgcattccttggtttatactttttctattcatcagggtaggaagtcttaaatccttaggcatccaagaagtatactagctttttgcttctcttttagaaatacttgtggggagagaaaaaaggatggtttgggcatattggtatagtttgagtaaactaaggttaatgttcatataacatttagactttgccataaatatcagaaccaaagatcaagacattcatgtacagtctggaatgtatatatggggcccataaaaattcccagtatgcatgttttatgctcaccattatgaattggggtcttcaaagagagaaggttgaaagtggaaagcacttgaaagggctccccggtttgtaaaatatctttaatcattcacattaggtacctcggagttgcgggtctcaaatgtggattcatgcatcatttgtgcagtttgaagatagtccatatttcctatttcagtattaggtcctgcaacacttttcaattcttgtagaaggtttttttcaggagtggtgatgtctgatgctcaattactattttccctataagagtttcagcatgagcttaattaaattcttgtgaaaaaacctgtgtttttagttacacacacacacacacacacacctacttaaatggaatctaaacatttttagcctttaatccattccattttctaaaactgtcataaactatttttaatcattttaaataaatgtaaaagaaaaataactggatttgattattgaatagtttttttctatatttcacaaataaattgtatgaaatgactgtagaagtggccccaaaattatgaaccttcgtagctgtgaatatgatgccataaatctcttttaaagctcaagatagactatgaacatatgaaatacatagttacctaatcatgagactaaattcacctgggtgacaaggctaacgttcaagctacttaagatgaaaatatttgaatcatgattgcttgggggaacctctctttgaggggtcatgaggaccacctgctgggcattctgttttcatgctgagaaggtgagaattgaacagatgagaaaagccttgataaaacgtcatctccatgtaatttagagaaggataaccttgactgtacagctgacccttgaacaacacagggctgaactgcacatgtccacctgtatgtgagtttgcttctggctctgccattactgagacagcaggaccaaccctccatctactcaatgggaagatgataaggatgaagacctttatggtgatccgcttccacttaataaatagtaaattcattaaaaaaaaaaaaaaa

SEQ ID NO: 888 - protein, 195 aa, Homo Sapiens
MESWWGLPCLAFLCFLMHARGQRDFDLADALDDPEPTKKPNSDIYPKPKPPYYPQPENPDSGGNIYPRPKPRPQPQPGNSGNSGGYFNDVDRDDGRYPPRPRPRPPAGGGGGGYSSYGNSDNTHGRGGYRLNSRYGNTYGGDHHSTYGNPEGNMVAKIVSPIVSVVVVTLLGAAASYFKLNNRRNCFRTHEPENV

SEQ ID NO: 889 - DNA, 4976 bp, Homo Sapiens
gggcgggcgggccgcaggctgtcgggctggggctgaggctgaggctgaggttgaggcggcggcggcggcggccgggtgcccgggacagcgacgcagcgcgccggcggccgcgacagggccagcgagagccccgcagcccgccgcagctgccgcctcgccgcggccgggccggagagcacggcggcgggagcgcggccttaggaggcggccggagcggtgggcacagctcggcgcggagcgtcctgtcaggcggcggccgagggcgtcgcggactctccccgcgatgatgccgatgatattaactgttttcttgagcaacaatgaacagattttaacagaagttcctataacaccggaaacaacctgtcgagatgttgtagaattttgcaaggaacctggagaaggcagctgccatttagctgaagtgtggaggggaaatgaacgtcccataccctttgatcatatgatgtacgaacatcttcagaaatggggtccacggagggaagaagtgaaatttttccttcgacacgaggactccccaactgagaacagtgaacaaggtggccgtcagacccaagagcaacgaactcagagaaatgtaataaatgtacctggagaaaaacgtactgaaaatggggttgggaatccacgtgttgaacttaccctctcagagctccaagatatggcagctaggcaacagcagcagattgaaaatcagcagcagatgttggttgccaaggaacagcgtttacattttctaaagcaacaggagcgccgtcagcagcagtctatttctgaaaatgaaaagcttcagaaattgaaagaacgagttgaagcccaggagaacaagctgaagaaaattcgtgcaatgagaggacaagtcgactacagcaaaatcatgaacggcaatctgtctgctgaaatagaaaggttcagtgccatgttccaggaaaagaagcaggaagtacagactgcaattttaagggttgatcagcttagtcagcaattggaagatttaaagaaaggaaaactgaatgggttccagtcttacaatggcaaattgacgggaccagcggcggtggagttaaaaagactgtaccaagaactacagattcgtaaccaacttaaccaggaacaaaattcaaaacttcagcagcagaaggaactcttaaataagcgcaacatggaggtggccatgatggacaagcgaatcagtgaactgcgtgaacgtctctatgggaaaaaaattcagctgaaccgtgtgaatggcacgtcatcaccacagtcccctctgagcacatcgggcagggtcgctgctgtggggccttatatccaggttcccagtgccggaagctttcctgtgctgggggaccctataaagccccagtctctcagtattgcctcaaatgctgctcatggaagatccaaatccgctaatgatggaaactggccaacattaaaacagaattctagctcttccgtgaaaccagtgcaggtggccggtgcagactggaaggatccgagcgtggaggggtctgtcaagcagggcactgtctccagccagcctgtgcccttctcagcactgggacccacggagaagccgggcatcgagattggtaaagtgccacctcccatcccgggtgtaggcaagcagctgcctccaagctatgggacatacccaagtcctacacctctgggtcctgggtcgacaagctccctggaaaggaggaaggaaggcagcttgcccaggcccagtgcaggcctgccaagtcgacagaggcccaccctgctgcccgccacaggcagcaccccccagccaggctcctcacaacagattcagcagaggatttccgtaccgccaagtcccacgtacccgccagcgggaccacctgcatttccagctggggacagcaagcctgaactcccactgacagtggccattaggcctttcctggctgataaagggtcaaggccacagtctcccaggaaaggaccccagacagtgaattcaagttccatatactccatgtacctccagcaagccacaccacctaagaattaccagccggcagcacacagcgccttaaataagtcagttaaagcagtgtatggtaagcccgttttaccttcgggttcaacctctccatcgccgctgccgtttcttcacgggtcactgtccacgggcacaccacagcctcagccaccttcagaaagtactgagaaagagcctgagcaggatggccccgccgcccccgcagatggcagcaccgtggagagcctgccacggccactcagccccaccaagctcacgcccatcgtgcattcgccactgcgctaccagagtgatgcagacctggaggccctccgcaggaagctggccaacgcgccccggcccctgaaaaagcgcagctccatcacagagcccgagggccccggcgggcccaacatccagaagctgctgtaccagcgcttcaacaccctggccggtggcatggagggcacccctttctaccagcccagcccctcccaggacttcatgggcaccttggccgatgtggacaatggaaacaccaatgccaatggaaacctggaagagctcccccctgcccagcccacagccccactccccgctgagcctgccccgtcatcagatgccaatgataatgagttaccttcccccgaaccagaggagctcatctgtccccaaaccacccaccaaactgccgagccggcagaggacaataacaacaacgtggccacggtccccaccacggagcagatcccgagtcctgtggctgaggccccatctccaggggaagagcaggtccctccagcacctcttccccctgccagccaccctcctgccacctccacgaacaagcggaccaacttgaagaagcccaactcggagcggacggggcacgggctgagagtccggtttaaccccctggcactgctcctagacgcgtctctggaaggagagttcgatctggtgcagaggatcatctatgaggtggaagatcccagcaagcccaacgacgaagggatcaccccactgcacaacgccgtctgcgccggccaccatcacatcgtgaagttcctgctggattttggtgtcaacgtgaatgctgctgatagtgatggatggacgccgctgcactgcgctgcctcttgtaacagcgttcacctctgcaaacagctggtggagagtggtgccgccatttttgcctcaaccataagcgacattgaaactgctgcagacaagtgtgaggagatggaggaaggctacatccagtgctcccagtttctatatggggtgcaggaaaagctgggtgtgatgaacaaaggtgtggcgtatgctctgtgggactacgaggcccagaacagtgacgagctgtccttccacgaaggggacgccctcaccatcctgaggcgcaaggacgaaagcgagactgagtggtggtgggctcgccttggagaccgggagggctatgtgcccaaaaacctgctggggctgtatccacggatcaaaccccgacagcgaacactcgcctgaacttccttttggagcaccgcatggtcttgccagctaccaggagccacttaagagattattgtgctgttttccaggaaagctgcagctagaaaatggtcttaatggtgctcactttagcagacagcgtccacaatgtgaatcctacagtttccaggtgaggccctttctccagtttgcccattaactgggagaggtactttcgcctccaaggactgaattttgccaattactataaatccaaataaatacccactttcaaaacacccacccctcttgccattaagaagtcccataacccccggttggttgccagtgaagacagaagctcttactgacttggccccgaggccatcaccccctccagcagtgaacactgtccgccgctgtgaggcctgctcccctgcgaccgccctgccccccgtcaccgaatcggacactcatcctttctcacacttcccacacatgatccttcttcccttcatcaccaaaggagcctctgtatggaaacatgtccagtgttgctgcccagtgtgtatgcctcccagtacccactctgctcggccgccttgggggttccgcttcctgttccagttcacctaaaggctgattgtgcaggcccagcactgtggctggactgccgcgccacgggcaccaggacccctaagaccaagtgacaactgggagagcctcagcatatactcttctcctccgatctcacagcctgtcatgctgctcagtgtggttctcacccctgcaagctcaaattcagttccctgaatggagtcaggtgctggaggccgtggcagcggagggtggttggggttggggctgggggtggactggtgtgagggcagaccagggccaggtagacggggctgtttggtgcctgaaggatggcagacgcctggtgtcaggaggggccgccaccaaggagcagcagctggggcagaggagctggggtcaggggccacccctctctgccgatctccctgcctgggctggctgtgaggccacctttgtcccaggcccagcctcaaggcaaggagggcgcttcactgaggtgtgaattgtacgtacaggctttttatataccaaaagtattttttgactagaccattcaaagctacccgaactatgttggaaattttttttttctcattaaaatacaggcccttaggctctatttttcatgtatgagtcgtgtgtaatttatgtaaaaatgtgtgtacagactcactgatgcagcactgtagcccatcaccttggagcactgactgtacatagtgtggtgaagaaaagtgaacgcccttgtagagcagcccgaccacaggagcatggccgctgccagcccagacgctgctgacgctgtgtaaatgtgcacaataaacccgtctcaccccggcaaaaaaaaaaaaaaaaa

SEQ ID NO: 890 - protein, 1090 aa, Homo Sapiens
MMPMILTVFLSNNEQILTEVPITPETTCRDVVEFCKEPGEGSCHLAEVWRGNERPIPFDHMMYEHLQKWGPRREEVKFFLRHEDSPTENSEQGGRQTQEQRTQRNVINVPGEKRTENGVGNPRVELTLSELQDMAARQQQQIENQQQMLVAKEQRLHFLKQQERRQQQSISENEKLQKLKERVEAQENKLKKIRAMRGQVDYSKIMNGNLSAEIERFSAMFQEKKQEVQTAILRVDQLSQQLEDLKKGKLNGFQSYNGKLTGPAAVELKRLYQELQIRNQLNQEQNSKLQQQKELLNKRNMEVAMMDKRISELRERLYGKKIQLNRVNGTSSPQSPLSTSGRVAAVGPYIQVPSAGSFPVLGDPIKPQSLSIASNAAHGRSKSANDGNWPTLKQNSSSSVKPVQVAGADWKDPSVEGSVKQGTVSSQPVPFSALGPTEKPGIEIGKVPPPIPGVGKQLPPSYGTYPSPTPLGPGSTSSLERRKEGSLPRPSAGLPSRQRPTLLPATGSTPQPGSSQQIQQRISVPPSPTYPPAGPPAFPAGDSKPELPLTVAIRPFLADKGSRPQSPRKGPQTVNSSSIYSMYLQQATPPKNYQPAAHSALNKSVKAVYGKPVLPSGSTSPSPLPFLHGSLSTGTPQPQPPSESTEKEPEQDGPAAPADGSTVESLPRPLSPTKLTPIVHSPLRYQSDADLEALRRKLANAPRPLKKRSSITEPEGPGGPNIQKLLYQRFNTLAGGMEGTPFYQPSPSQDFMGTLADVDNGNTNANGNLEELPPAQPTAPLPAEPAPSSDANDNELPSPEPEELICPQTTHQTAEPAEDNNNNVATVPTTEQIPSPVAEAPSPGEEQVPPAPLPPASHPPATSTNKRTNLKKPNSERTGHGLRVRFNPLALLLDASLEGEFDLVQRIIYEVEDPSKPNDEGITPLHNAVCAGHHHIVKFLLDFGVNVNAADSDGWTPLHCAASCNSVHLCKQLVESGAAIFASTISDIETAADKCEEMEEGYIQCSQFLYGVQEKLGVMNKGVAYALWDYEAQNSDELSFHEGDALTILRRKDESETEWWWARLGDREGYVPKNLLGLYPRIKPRQRTLA

SEQ ID NO: 891 - DNA, 4801 bp, Homo Sapiens
aaagggggaaaagaaagtgcggcggaaagtaagaggctcactggggaagactgccgggatccaggtctccggggtccgctttggccagaggcgcggaaggaagcagtgcccggcgacactgcacccatcccggctgcttttgctgcgccctctcagcttcccaagaaaggcatcgtcatgtgatcatcacctaagaactagaacatcagcaggccctagaagcctcactcttgcccctccctttaatatctcaaaggatgacacttctgtggtgtgtagtgagtctctacttttatggaatcctgcaaagtgatgcctcagaacgctgcgatgactggggactagacaccatgaggcaaatccaagtgtttgaagatgagccagctcgcatcaagtgcccactctttgaacacttcttgaaattcaactacagcacagcccattcagctggccttactctgatctggtattggactaggcaggaccgggaccttgaggagccaattaacttccgcctccccgagaaccgcattagtaaggagaaagatgtgctgtggttccggcccactctcctcaatgacactggcaactatacctgcatgttaaggaacactacatattgcagcaaagttgcatttcccttggaagttgttcaaaaagacagctgtttcaattcccccatgaaactcccagtgcataaactgtatatagaatatggcattcagaggatcacttgtccaaatgtagatggatattttccttccagtgtcaaaccgactatcacttggtatatgggctgttataaaatacagaattttaataatgtaatacccgaaggtatgaacttgagtttcctcattgccttaatttcaaataatggaaattacacatgtgttgttacatatccagaaaatggacgtacgtttcatctcaccaggactctgactgtaaaggtagtaggctctccaaaaaatgcagtgccccctgtgatccattcacctaatgatcatgtggtctatgagaaagaaccaggagaggagctactcattccctgtacggtctattttagttttctgatggattctcgcaatgaggtttggtggaccattgatggaaaaaaacctgatgacatcactattgatgtcaccattaacgaaagtataagtcatagtagaacagaagatgaaacaagaactcagattttgagcatcaagaaagttacctctgaggatctcaagcgcagctatgtctgtcatgctagaagtgccaaaggcgaagttgccaaagcagccaaggtgaagcagaaagtgccagctccaagatacacagtggaactggcttgtggttttggagccacagtcctgctagtggtgattctcattgttgtttaccatgtttactggctagagatggtcctattttaccgggctcattttggaacagatgaaaccattttagatggaaaagagtatgatatttatgtatcctatgcaaggaatgcggaagaagaagaatttgtattactgaccctccgtggagttttggagaatgaatttggatacaagctgtgcatctttgaccgagacagtctgcctgggggaattgtcacagatgagactttgagcttcattcagaaaagcagacgcctcctggttgttctaagccccaactacgtgctccagggaacccaagccctcctggagctcaaggctggcctagaaaatatggcctctcggggcaacatcaacgtcattttagtacagtacaaagctgtgaaggaaacgaaggtgaaagagctgaagagggctaagacggtgctcacggtcattaaatggaaaggggaaaaatccaagtatccacagggcaggttctggaagcagctgcaggtggccatgccagtgaagaaaagtcccaggcggtctagcagtgatgagcagggcctctcgtattcatctttgaaaaatgtatgaaaggaataatgaaaagggtaaaaagaacaaggggtgctccaggaagaaagagtccccccagtcttcattcgcagtttatggtttcataggcaaaaataatggtctaagcctcccaatagggataaatttagggtgactgtgtggctgactattctgcttcctcaggcaacactaaagtttagaaagatatcatcaacgttctgtcaccagtctctgatgccactatgttctttgcaggcaaagacttgttcaatgcgaatttccccttctacattgtctatccctgtttttatatgtctccattctttttaaaatcttaacatatggagcagcctttcctatgaatttaaatatgcctttaaaataagtcactgttgacagggtcatgagtttccgagtatagttttctttttatcttatttttactcgtccgttgaaaagataatcaaggcctacattttagctgaggataatgaacttttttcctcattcggctgtataatacataaccacagcaagactgacatccacttaggatgatacaaagcagtgtaactgaaaatgtttcttttaattgatttaaaggacttgtcttctataccacccttgtcctcatctcaggtaatttatgaaatctatgtaaacttgaaaaatatttcttaatttttgtttttgctccagtcaattcctgattatccacaggtcaacccacattttttcattccttctccctatctgcttatatcgcattgctcatttagagtttgcaggaggctccatactaggttcagtctgaaagaaatctcctaatggtgctatagagagggaggtaacagaaagactcttttagggcatttttctgactcatgaaaagagcacagaaaaggatgtttggcaatttgtcttttaagtcttaaccttgctaatgtgaatactgggaaagtgattttttctcactcgtttttgttgctccattgtaaagggcggaggtcagtcttagtggccttgagagttgcttttggcattaatattctaagagaattaactgtatttcctgtcacctattcactagtgcaggaaatatacttgctccaaataagtcagtatgagaagtcactgtcaatgaaagttgttttgtttgttttcagtaatattttgctgtttttaagacttggaaaactaagtgcagagtttacagagtggtaaatatctatgttacatgtagattatacatatatatacacacgtgtatatgagatatatatcttatatctccacaaacacaaattatatatatacatatccacacacatacattacatatatctgtgtatataaatccacatgcacatgaaatatatatatatatataatttgtgtgtgtgtatgtgtatgtatatgactttaaatagctatgggtacaatattaaaaaccactggaactcttgtccagtttttaaattatgtttttactggaatgtttttgtgtcagtgttttctgtacatattatttgttaattcacagctcacagagtgatagttgtcatagttcttgccttccctaagtttatataaataacttaagtattgctacagtttatctaggttgcagtggcatctgctgtgcacagagcttccatggtcactgctaagcagtagccagccatcgggcattaattgatttcctactatattcccagcagacacatttagaaactaagctatgttaacctcagtgctcaactatttgaactgttgagtgataaaggaaacaaatataactgtaaatgaatcttggtatcctgtgaaacagaataattcgtaatttaagaaagcccttatcccggtaacatgaatgttgatgaacaaatgtaaaattatatcctatatttaagtacccataataaatcatttccctctataagtgttattgattattttaaattgaaaaaagtttcacttggatgaaaaaagtagaaaagtaggtcattcttggatctacttttttttagccttattaatatttttccctattagaaaccacaattactccctctattaacccttcacttactagaccagaaaagaacttattccagataagctttgaatatcaattcttacataaactttaggcaaacagggaatagtctagtcaccaaaggaccattctcttgccaatgctgcattccttttgcacttttggattccatatttatcccaaatgctgttgggcacccctagaaataccttgatgttttttctatttatatgcctgcctttggtacttaattttacaaatgctgtaatataaagcatatcaagtttatgtgatacgtatcattgcaagagaatttgtttcaagatttttttttaatgttccagaagatggccaatagagaacattcaagggaaatggggaaacataatttagagaacaagaacaaaccatgtctcaaatttttttaaaaaaaattaatggttttaaatatatgctatagggacgttccatgcccaggttaacaaagaactgtgatatatagagtgtctaattacaaaatcatatacgatttatttaattctcttctgtattgtaacttagatgattcccaaggactctaataaaaaatcacttcattgtatttggaaacaaaaacatcattcattaattacttattttctttccataggttttaatattttgagagtgtcttttttatttcattcatgaacttttgtatttttcatttttcatttgatttgtaaatttacttatgttaaaaataaaccatttattttcagctttgaattttaaaaaaaaaaaaaaaaaa

SEQ ID NO: 892 - protein, 570 aa, Homo Sapiens
MTLLWCVVSLYFYGILQSDASERCDDWGLDTMRQIQVFEDEPARIKCPLFEHFLKFNYSTAHSAGLTLIWYWTRQDRDLEEPINFRLPENRISKEKDVLWFRPTLLNDTGNYTCMLRNTTYCSKVAFPLEVVQKDSCFNSPMKLPVHKLYIEYGIQRITCPNVDGYFPSSVKPTITWYMGCYKIQNFNNVIPEGMNLSFLIALISNNGNYTCVVTYPENGRTFHLTRTLTVKVVGSPKNAVPPVIHSPNDHVVYEKEPGEELLIPCTVYFSFLMDSRNEVWWTIDGKKPDDITIDVTINESISHSRTEDETRTQILSIKKVTSEDLKRSYVCHARSAKGEVAKAAKVKQKVPAPRYTVELACGFGATVLLVVILIVVYHVYWLEMVLFYRAHFGTDETILDGKEYDIYVSYARNAEEEEFVLLTLRGVLENEFGYKLCIFDRDSLPGGIVTDETLSFIQKSRRLLVVLSPNYVLQGTQALLELKAGLENMASRGNINVILVQYKAVKETKVKELKRAKTVLTVIKWKGEKSKYPQGRFWKQLQVAMPVKKSPRRSSSDEQGLSYSSLKNV

SEQ ID NO: 893 - DNA, 10661 bp, Homo Sapiens
cgagatcccggggagccagcttgctgggagagcgggacggtccggagcaagcccagaggcagaggaggcgacagagggaaaaagggccgagctagccgctccagtgctgtacaggagccgaagggacgcaccacgccagccccagcccggctccagcgacagccaacgcctcttgcagcgcggcggcttcgaagccgccgcccggagctgccctttcctcttcggtgaagtttttaaaagctgctaaagactcggaggaagcaaggaaagtgcctggtaggactgacggctgcctttgtcctcctcctctccaccccgcctccccccaccctgccttccccccctcccccgtcttctctcccgcagctgcctcagtcggctactctcagccaacccccctcaccacccttctccccacccgcccccccgcccccgtcggcccagcgctgccagcccgagtttgcagagaggtaactccctttggctgcgagcgggcgagctagctgcacattgcaaagaaggctcttaggagccaggcgactggggagcggcttcagcactgcagccacgacccgcctggttaggctgcacgcggagagaaccctctgttttcccccactctctctccacctcctcctgccttccccaccccgagtgcggagccagagatcaaaagatgaaaaggcagtcaggtcttcagtagccaaaaaacaaaacaaacaaaaacaaaaaagccgaaataaaagaaaaagataataactcagttcttatttgcacctacttcagtggacactgaatttggaaggtggaggattttgtttttttcttttaagatctgggcatcttttgaatctacccttcaagtattaagagacagactgtgagcctagcagggcagatcttgtccaccgtgtgtcttcttctgcacgagactttgaggctgtcagagcgctttttgcgtggttgctcccgcaagtttccttctctggagcttcccgcaggtgggcagctagctgcagcgactaccgcatcatcacagcctgttgaactcttctgagcaagagaaggggaggcggggtaagggaagtaggtggaagattcagccaagctcaaggatggaagtgcagttagggctgggaagggtctaccctcggccgccgtccaagacctaccgaggagctttccagaatctgttccagagcgtgcgcgaagtgatccagaacccgggccccaggcacccagaggccgcgagcgcagcacctcccggcgccagtttgctgctgctgcagcagcagcagcagcagcagcagcagcagcagcagcagcagcagcagcagcagcagcagcagcagcaagagactagccccaggcagcagcagcagcagcagggtgaggatggttctccccaagcccatcgtagaggccccacaggctacctggtcctggatgaggaacagcaaccttcacagccgcagtcggccctggagtgccaccccgagagaggttgcgtcccagagcctggagccgccgtggccgccagcaaggggctgccgcagcagctgccagcacctccggacgaggatgactcagctgccccatccacgttgtccctgctgggccccactttccccggcttaagcagctgctccgctgaccttaaagacatcctgagcgaggccagcaccatgcaactccttcagcaacagcagcaggaagcagtatccgaaggcagcagcagcgggagagcgagggaggcctcgggggctcccacttcctccaaggacaattacttagggggcacttcgaccatttctgacaacgccaaggagttgtgtaaggcagtgtcggtgtccatgggcctgggtgtggaggcgttggagcatctgagtccaggggaacagcttcggggggattgcatgtacgccccacttttgggagttccacccgctgtgcgtcccactccttgtgccccattggccgaatgcaaaggttctctgctagacgacagcgcaggcaagagcactgaagatactgctgagtattcccctttcaagggaggttacaccaaagggctagaaggcgagagcctaggctgctctggcagcgctgcagcagggagctccgggacacttgaactgccgtctaccctgtctctctacaagtccggagcactggacgaggcagctgcgtaccagagtcgcgactactacaactttccactggctctggccggaccgccgccccctccgccgcctccccatccccacgctcgcatcaagctggagaacccgctggactacggcagcgcctgggcggctgcggcggcgcagtgccgctatggggacctggcgagcctgcatggcgcgggtgcagcgggacccggttctgggtcaccctcagccgccgcttcctcatcctggcacactctcttcacagccgaagaaggccagttgtatggaccgtgtggtggtggtgggggtggtggcggcggcggcggcggcggcggcggcggcggcggcggcggcggcggcggcgaggcgggagctgtagccccctacggctacactcggccccctcaggggctggcgggccaggaaagcgacttcaccgcacctgatgtgtggtaccctggcggcatggtgagcagagtgccctatcccagtcccacttgtgtcaaaagcgaaatgggcccctggatggatagctactccggaccttacggggacatgcgtttggagactgccagggaccatgttttgcccattgactattactttccaccccagaagacctgcctgatctgtggagatgaagcttctgggtgtcactatggagctctcacatgtggaagctgcaaggtcttcttcaaaagagccgctgaagggaaacagaagtacctgtgcgccagcagaaatgattgcactattgataaattccgaaggaaaaattgtccatcttgtcgtcttcggaaatgttatgaagcagggatgactctgggagcccggaagctgaagaaacttggtaatctgaaactacaggaggaaggagaggcttccagcaccaccagccccactgaggagacaacccagaagctgacagtgtcacacattgaaggctatgaatgtcagcccatctttctgaatgtcctggaagccattgagccaggtgtagtgtgtgctggacacgacaacaaccagcccgactcctttgcagccttgctctctagcctcaatgaactgggagagagacagcttgtacacgtggtcaagtgggccaaggccttgcctggcttccgcaacttacacgtggacgaccagatggctgtcattcagtactcctggatggggctcatggtgtttgccatgggctggcgatccttcaccaatgtcaactccaggatgctctacttcgcccctgatctggttttcaatgagtaccgcatgcacaagtcccggatgtacagccagtgtgtccgaatgaggcacctctctcaagagtttggatggctccaaatcaccccccaggaattcctgtgcatgaaagcactgctactcttcagcattattccagtggatgggctgaaaaatcaaaaattctttgatgaacttcgaatgaactacatcaaggaactcgatcgtatcattgcatgcaaaagaaaaaatcccacatcctgctcaagacgcttctaccagctcaccaagctcctggactccgtgcagcctattgcgagagagctgcatcagttcacttttgacctgctaatcaagtcacacatggtgagcgtggactttccggaaatgatggcagagatcatctctgtgcaagtgcccaagatcctttctgggaaagtcaagcccatctatttccacacccagtgaagcattggaaaccctatttccccaccccagctcatgccccctttcagatgtcttctgcctgttataactctgcactactcctctgcagtgccttggggaatttcctctattgatgtacagtctgtcatgaacatgttcctgaattctatttgctgggctttttttttctctttctctcctttctttttcttcttccctccctatctaaccctcccatggcaccttcagactttgcttcccattgtggctcctatctgtgttttgaatggtgttgtatgcctttaaatctgtgatgatcctcatatggcccagtgtcaagttgtgcttgtttacagcactactctgtgccagccacacaaacgtttacttatcttatgccacgggaagtttagagagctaagattatctggggaaatcaaaacaaaaacaagcaaacaaaaaaaaaaagcaaaaacaaaacaaaaaataagccaaaaaaccttgctagtgttttttcctcaaaaataaataaataaataaataaatacgtacatacatacacacatacatacaaacatatagaaatccccaaagaggccaatagtgacgagaaggtgaaaattgcaggcccatggggagttactgattttttcatctcctccctccacgggagactttattttctgccaatggctattgccattagagggcagagtgaccccagagctgagttgggcaggggggtggacagagaggagaggacaaggagggcaatggagcatcagtacctgcccacagccttggtccctgggggctagactgctcaactgtggagcaattcattatactgaaaatgtgcttgttgttgaaaatttgtctgcatgttaatgcctcacccccaaacccttttctctctcactctctgcctccaacttcagattgactttcaatagtttttctaagacctttgaactgaatgttctcttcagccaaaacttggcgacttccacagaaaagtctgaccactgagaagaaggagagcagagatttaaccctttgtaaggccccatttggatccaggtctgctttctcatgtgtgagtcagggaggagctggagccagaggagaagaaaatgatagcttggctgttctcctgcttaggacactgactgaatagttaaactctcactgccactaccttttccccacctttaaaagacctgaatgaagttttctgccaaactccgtgaagccacaagcaccttatgtcctcccttcagtgttttgtgggcctgaatttcatcacactgcatttcagccatggtcatcaagcctgtttgcttcttttgggcatgttcacagattctctgttaagagcccccaccaccaagaaggttagcaggccaacagctctgacatctatctgtagatgccagtagtcacaaagatttcttaccaactctcagatcgctggagcccttagacaaactggaaagaaggcatcaaagggatcaggcaagctgggcgtcttgcccttgtcccccagagatgataccctcccagcaagtggagaagttctcacttccttctttagagcagctaaaggggctacccagatcagggttgaagagaaaactcaattaccagggtgggaagaatgaaggcactagaaccagaaaccctgcaaatgctcttcttgtcacccagcatatccacctgcagaagtcatgagaagagagaaggaacaaagaggagactctgactactgaattaaaatcttcagcggcaaagcctaaagccagatggacaccatctggtgagtttactcatcatcctcctctgctgctgattctgggctctgacattgcccatactcactcagattccccacctttgttgctgcctcttagtcagagggaggccaaaccattgagactttctacagaaccatggcttctttcggaaaggtctggttggtgtggctccaatactttgccacccatgaactcagggtgtgccctgggacactggttttatatagtcttttggcacacctgtgttctgttgacttcgttcttcaagcccaagtgcaagggaaaatgtccacctactttctcatcttggcctctgcctccttacttagctcttaatctcatctgttgaactcaagaaatcaagggccagtcatcaagctgcccattttaattgattcactctgtttgttgagaggatagtttctgagtgacatgatatgatccacaagggtttccttccctgatttctgcattgatattaatagccaaacgaacttcaaaacagctttaaataacaagggagaggggaacctaagatgagtaatatgccaatccaagactgctggagaaaactaaagctgacaggttccctttttggggtgggatagacatgttctggttttctttattattacacaatctggctcatgtacaggatcacttttagctgttttaaacagaaaaaaatatccaccactcttttcagttacactaggttacattttaataggtcctttacatctgttttggaatgattttcatcttttgtgatacacagattgaattatatcattttcatatctctccttgtaaatactagaagctctcctttacatttctctatcaaatttttcatctttatgggtttcccaattgtgactcttgtcttcatgaatatatgtttttcatttgcaaaagccaaaaatcagtgaaacagcagtgtaattaaaagcaacaactggattactccaaatttccaaatgacaaaactagggaaaaatagcctacacaagcctttaggcctactctttctgtgcttgggtttgagtgaacaaaggagattttagcttggctctgttctcccatggatgaaaggaggaggattttttttttcttttggccattgatgttctagccaatgtaattgacagaagtctcattttgcatgcgctctgctctacaaacagagttggtatggttggtatactgtactcacctgtgagggactggccactcagacccacttagctggtgagctagaagatgaggatcactcactggaaaagtcacaaggaccatctccaaacaagttggcagtgctcgatgtggacgaagagtgaggaagagaaaaagaaggagcaccagggagaaggctccgtctgtgctgggcagcagacagctgccaggatcacgaactctgtagtcaaagaaaagagtcgtgtggcagtttcagctctcgttcattgggcagctcgcctaggcccagcctctgagctgacatgggagttgttggattctttgtttcatagctttttctatgccataggcaatattgttgttcttggaaagtttattatttttttaactcccttactctgagaaagggatattttgaaggactgtcatatatctttgaaaaaagaaaatctgtaatacatatatttttatgtatgttcactggcactaaaaaatatagagagcttcattctgtcctttgggtagttgctgaggtaattgtccaggttgaaaaataatgtgctgatgctagagtccctctctgtccatactctacttctaaatacatataggcatacatagcaagttttatttgacttgtactttaagagaaaatatgtccaccatccacatgatgcacaaatgagctaacattgagcttcaagtagcttctaagtgtttgtttcattaggcacagcacagatgtggcctttccccccttctctcccttgatatctggcagggcataaaggcccaggccacttcctctgccccttcccagccctgcaccaaagctgcatttcaggagactctctccagacagcccagtaactacccgagcatggcccctgcatagccctggaaaaataagaggctgactgtctacgaattatcttgtgccagttgcccaggtgagagggcactgggccaagggagtggttttcatgtttgacccactacaaggggtcatgggaatcaggaatgccaaagcaccagatcaaatccaaaacttaaagtcaaaataagccattcagcatgttcagtttcttggaaaaggaagtttctacccctgatgcctttgtaggcagatctgttctcaccattaatctttttgaaaatcttttaaagcagtttttaaaaagagagatgaaagcatcacattatataaccaaagattacattgtacctgctaagataccaaaattcataagggcagggggggagcaagcattagtgcctctttgataagctgtccaaagacagactaaaggactctgctggtgactgacttataagagctttgtgggtttttttttccctaataatatacatgtttagaagaattgaaaataatttcgggaaaatgggattatgggtccttcactaagtgattttataagcagaactggctttccttttctctagtagttgctgagcaaattgttgaagctccatcattgcatggttggaaatggagctgttcttagccactgtgtttgctagtgcccatgttagcttatctgaagatgtgaaacccttgctgataagggagcatttaaagtactagattttgcactagagggacagcaggcagaaatccttatttctgcccactttggatggcacaaaaagttatctgcagttgaaggcagaaagttgaaatacattgtaaatgaatatttgtatccatgtttcaaaattgaaatatatatatatatatatatatatatatatatatatatatagtgtgtgtgtgtgttctgatagctttaactttctctgcatctttatatttggttccagatcacacctgatgccatgtacttgtgagagaggatgcagttttgttttggaagctctctcagaacaaacaagacacctggattgatcagttaactaaaagttttctcccctattgggtttgacccacaggtcctgtgaaggagcagagggataaaaagagtagaggacatgatacattgtactttactagttcaagacagatgaatgtggaaagcataaaaactcaatggaactgactgagatttaccacagggaaggcccaaacttggggccaaaagcctacccaagtgattgaccagtggccccctaatgggacctgagctgttggaagaagagaactgttccttggtcttcaccatccttgtgagagaagggcagtttcctgcattggaacctggagcaagcgctctatctttcacacaaattccctcacctgagattgaggtgctcttgttactgggtgtctgtgtgctgtaattctggttttggatatgttctgtaaagattttgacaaatgaaaatgtgtttttctctgttaaaacttgtcagagtactagaagttgtatctctgtaggtgcaggtccatttctgcccacaggtagggtgtttttctttgattaagagattgacacttctgttgcctaggacctcccaactcaaccatttctaggtgaaggcagaaaaatccacattagttactcctcttcagacatttcagctgagataacaaatcttttggaattttttcacccatagaaagagtggtagatatttgaatttagcaggtggagtttcatagtaaaaacagcttttgactcagctttgatttatcctcatttgatttggccagaaagtaggtaatatgcattgattggcttctgattccaattcagtatagcaaggtgctaggttttttcctttccccacctgtctcttagcctggggaattaaatgagaagccttagaatgggtggcccttgtgacctgaaacacttcccacataagctacttaacaagattgtcatggagctgcagattccattgcccaccaaagactagaacacacacatatccatacaccaaaggaaagacaattctgaaatgctgtttctctggtggttccctctctggctgctgcctcacagtatgggaacctgtactctgcagaggtgacaggccagatttgcattatctcacaaccttagcccttggtgctaactgtcctacagtgaagtgcctggggggttgtcctatcccataagccacttggatgctgacagcagccaccatcagaatgacccacgcaaaaaaaagaaaaaaaaaattaaaaagtcccctcacaacccagtgacacctttctgctttcctctagactggaacattgattagggagtgcctcagacatgacattcttgtgctgtccttggaattaatctggcagcaggagggagcagactatgtaaacagagataaaaattaattttcaatattgaaggaaaaaagaaataagaagagagagagaaagaaagcatcacacaaagattttcttaaaagaaacaattttgcttgaaatctctttagatggggctcatttctcacggtggcacttggcctccactgggcagcaggaccagctccaagcgctagtgttctgttctctttttgtaatcttggaatcttttgttgctctaaatacaattaaaaatggcagaaacttgtttgttggactacatgtgtgactttgggtctgtctctgcctctgctttcagaaatgtcatccattgtgtaaaatattggcttactggtctgccagctaaaacttggccacatcccctgttatggctgcaggatcgagttattgttaacaaagagacccaagaaaagctgctaatgtcctcttatcattgttgttaatttgttaaaacataaagaaatctaaaatttcaaaaaa

SEQ ID NO: 894 - protein, 920 aa, Homo Sapiens
MEVQLGLGRVYPRPPSKTYRGAFQNLFQSVREVIQNPGPRHPEAASAAPPGASLLLLQQQQQQQQQQQQQQQQQQQQQQQETSPRQQQQQQGEDGSPQAHRRGPTGYLVLDEEQQPSQPQSALECHPERGCVPEPGAAVAASKGLPQQLPAPPDEDDSAAPSTLSLLGPTFPGLSSCSADLKDILSEASTMQLLQQQQQEAVSEGSSSGRAREASGAPTSSKDNYLGGTSTISDNAKELCKAVSVSMGLGVEALEHLSPGEQLRGDCMYAPLLGVPPAVRPTPCAPLAECKGSLLDDSAGKSTEDTAEYSPFKGGYTKGLEGESLGCSGSAAAGSSGTLELPSTLSLYKSGALDEAAAYQSRDYYNFPLALAGPPPPPPPPHPHARIKLENPLDYGSAWAAAAAQCRYGDLASLHGAGAAGPGSGSPSAAASSSWHTLFTAEEGQLYGPCGGGGGGGGGGGGGGGGGGGGGGGEAGAVAPYGYTRPPQGLAGQESDFTAPDVWYPGGMVSRVPYPSPTCVKSEMGPWMDSYSGPYGDMRLETARDHVLPIDYYFPPQKTCLICGDEASGCHYGALTCGSCKVFFKRAAEGKQKYLCASRNDCTIDKFRRKNCPSCRLRKCYEAGMTLGARKLKKLGNLKLQEEGEASSTTSPTEETTQKLTVSHIEGYECQPIFLNVLEAIEPGVVCAGHDNNQPDSFAALLSSLNELGERQLVHVVKWAKALPGFRNLHVDDQMAVIQYSWMGLMVFAMGWRSFTNVNSRMLYFAPDLVFNEYRMHKSRMYSQCVRMRHLSQEFGWLQITPQEFLCMKALLLFSIIPVDGLKNQKFFDELRMNYIKELDRIIACKRKNPTSCSRRFYQLTKLLDSVQPIARELHQFTFDLLIKSHMVSVDFPEMMAEIISVQVPKILSGKVKPIYFHTQ

SEQ ID NO: 895 - DNA, 1476 bp, Homo Sapiens
ccccgccgggctcgcgccgcagaggccggtgaggcgccggcggccacgccgcggaaggcgcgggccgagcagagccgggcgttggagcccgcgcgcgcatggaggcgttgccggcagccccctgagggcagcggggagacaagacccggcgacctcgcgcatccctcgagccgccacgcgctctcgccaccgggcggcgacgggccgcggagccggcgcggccatggcgacgggcggccagcagaaggagaacacgctgcttcacctcttcgccggcgggtgtggaggcacagttggtgctattttcacttgtccactagaagtcattaagacacggttgcagtcttcaagattagctctccggacagtctactatcctcaggttcatctggggaccattagtggagctggaatggtgagaccaacatccgtgacacctggactctttcaggttctgaagtcgatcttggagaaagagggaccaaagtcactttttagaggcttgggtccaaatttggttggagttgcaccatcaagggctgtatactttgcatgttactccaaagccaaagagcaatttaatggcattttcgtgcctaacagcaatattgtgcatattttctcagctggctctgcagcttttatcacaaattccttaatgaatcctatatggatggttaaaacccgaatgcagctagaacagaaagtgaggggctctaagcagatgaatacactccagtgtgctcgttacgtttaccagaccgaaggcattcgtggcttctatagaggattaactgcctcgtatgctggaatttccgaaactataatctgctttgctatttatgaaagtttaaagaagtatctgaaagaagctccattagcctcttctgcaaatgggactgagaaaaattccacaagtttttttggacttatggcagctgctgctctttctaagggctgtgcctcctgcattgcttatccacacgaagtcataaggacgaggctccgggaagagggcaccaagtacaagtcttttgtccagacggcgcgcctggtgttccgggaagaaggctaccttgccttttatagaggactgtttgcccagcttatccggcagatcccaaatactgccattgtgttgtctacttatgagttaattgtgtacctgttagaagaccgtactcagtaacaggccggaaaattgtgctctagaagaataaaactgaaaaactctagagaattttttttccccattgatgtttagaaagtttgagactgaaacaggaaaggccataaaatatctggttcatatcacctgttggacatttccttttggattcatgctttctggaaggtttaaattcattaacgttaatagttaattataactttttttttaacttaagaggattcagggttaagcaccaactaaattaaatcatgctatttaatttaagtataaaaaaaaaaaaaaaa

SEQ ID NO: 896 - protein, 321 aa, Homo Sapiens
MATGGQQKENTLLHLFAGGCGGTVGAIFTCPLEVIKTRLQSSRLALRTVYYPQVHLGTISGAGMVRPTSVTPGLFQVLKSILEKEGPKSLFRGLGPNLVGVAPSRAVYFACYSKAKEQFNGIFVPNSNIVHIFSAGSAAFITNSLMNPIWMVKTRMQLEQKVRGSKQMNTLQCARYVYQTEGIRGFYRGLTASYAGISETIICFAIYESLKKYLKEAPLASSANGTEKNSTSFFGLMAAAALSKGCASCIAYPHEVIRTRLREEGTKYKSFVQTARLVFREEGYLAFYRGLFAQLIRQIPNTAIVLSTYELIVYLLEDRTQ

SEQ ID NO: 897 - DNA, 1060 bp, Homo Sapiens
ctgagcgcccggcccgaccccggccatggggtgctgctacagcagcgagaacgaggactcggaccaggaccgagaggagcggaagctgctgctggaccctagcagcccccctaccaaagctctcaatggagccgagcccaactaccacagcctgccttccgctcgcactgatgagcaggccctgctctcttccatccttgccaagacagccagcaacatcattgatgtgtctgctgcagactcacagggcatggagcagcatgagtacatggaccgtgccaggcagtacagcacccgcttggctgtgctgagcagcagcctgacccattggaagaagctgccaccgctgccgtctcttaccagccagccccaccaagtgctggccagtgagcccatcccgttctctgatttgcagcaggtctccaggatagctgcttatgcctacagtgcactttctcagatccgtgtggacgcaaaagaggagctggttgtacagtttgggatcccatgaagagaggggtccttggacagctcttctcctctcttcatcccatctctaccccacccccttggcccccagcctcactgcggcttatacagtaccctaacctgctactaatcacagagaaaaatgtgaagaaggaggagaagaggaaggctagaagcctgagcaagtgagggtagaaccttttgggactggcctttgaagctctggccagggatggggtgggggccaaaaggacagagcctggtatgtcttcatagtcattgagaatgtggagataccagtttgggtggggggtgatcaccaggggacctagggagatccccttcccaccctctctgttggcctcagagtcactcctgccccctctccctgacttggtgctcacatgcacctcactagggtttgtgaccagggtctggatgagcttgaatttgaatgaattgagtttgtatttctagaaccctgggtttttacatgtttggtctttttttgttttggtttgtcaccctcgataaaggaagtatattcatccaaaaaaaaaaaaaaaaaaaa

SEQ ID NO: 898 - protein, 161 aa, Homo Sapiens
MGCCYSSENEDSDQDREERKLLLDPSSPPTKALNGAEPNYHSLPSARTDEQALLSSILAKTASNIIDVSAADSQGMEQHEYMDRARQYSTRLAVLSSSLTHWKKLPPLPSLTSQPHQVLASEPIPFSDLQQVSRIAAYAYSALSQIRVDAKEELVVQFGIP

SEQ ID NO: 899 - DNA, 9159 bp, Homo Sapiens
agccctcctcccctttccccgcccactccgggctggccttatccagtagcgtctgggtccctggactaaagccgtcaaatgtaaccaattgctgaggagctctcccctaagaatcccgcctccactctgaggaacagcttcgctgatcaatggatcccctcctagacgcaatgagcgcgcggggcaagtggagaagcggctgaactgcccaatgaacaagcggtttccgtggttaggggcgtggcagaagcggtcgtcaggggcgtggcggcagttacttgggcggggccggtagcggcgggagctgcactggccaggggttccggctgtatatccatgagcgccgctggcagccggggagctgcaggaaccagactgggggcgagctgagcacctgtagtcaatcacacgcagaaataataatgatacttatgttagaagattgttttgagaagtgcatggagttactacatctgaagcatttagaacagtacctggcacagggttctgtcctcttcatttgcaagccactgctttatccacgagggtgctccctacttatgccagtgaattaatttttggcacagatgaatccttcatatttatctggatttagctggtagcatttgtctcctaagacttggtcacagaggaatccatgtgaccttcaggccttctgctctaaactggcaggagatcctgtttctactcacagcgtccgagggtctggtggccgagccctgaggggcgctgttgctcccaggtggcagaattcagcatcagagagccacacagctgaaagagatggatggcttttaggtttgtttgaataagagatctgacctgaccggcccaactgtacaactcttcaaggaaaattcgtatttgcagtgggaagaataagtaacattgatcaagatgaatgccatgctggagactcccgaactcccagccgtgtttgatggagtgaagctggctgcagtggctgctgtgctgtacgtgatcgtccggtgtttgaacctgaagagccccacagccccacctgacctctacttccaggactcggggctctcacgctttctgctcaagtcctgtcctcttctgaccaaagaatacattccaccgttgatctgggggaaaagtggacacatccagacagccttgtatgggaagatgggaagggtgaggtcgccacatccttatgggcaccggaagttcatcactatgtctgatggagccacttctacattcgacctcttcgagcccttggctgagcactgtgttggagatgatatcaccatggtcatctgccctggaattgccaatcacagcgagaagcaatacatccgcactttcgttgactacgcccagaaaaatggctatcggtgcgccgtgctgaaccacctgggtgccctgcccaacattgaattgacctcgccacgcatgttcacctatggctgcacgtgggaatttggagccatggtgaactacatcaagaagacatatcccctgacccagctggtcgtcgtgggcttcagcctgggtggtaacattgtgtgcaaatacttgggggagactcaggcaaaccaagagaaggtcctgtgctgcgtcagcgtgtgccaggggtacagtgcactgagggcccaggaaaccttcatgcaatgggatcagtgccggcggttctacaacttcctcatggctgacaacatgaagaagatcatcctctcgcacaggcaagctctttttggagaccatgttaagaaaccccagagcctggaagacacggacttgagccggctctacacagcaacatccctgatgcagattgatgacaatgtgatgaggaagtttcacggctataactccctgaaggaatactatgaggaagaaagttgcatgcggtacctgcacaggatttatgttcctctcatgctggttaatgcagctgacgatccgttggtgcatgaaagtcttctaaccattccaaaatctctttcagagaaacgagagaacgtcatgtttgtgctgcctctgcatgggggccacttgggcttctttgagggctctgtgctgttccccgagcccctgacatggatggataagctggtggtggagtacgccaacgccatttgccaatgggagcgtaacaagttgcagtgctctgacacggagcaggtggaggccgacctggagtgaggcctccggactctggcacgctccagcagccctcctctggaagctgcgtcccctcaccccctgtttcaggtctcccatctccctcagtgacctggatctgacctcacaccatcagcagggggcacccaccatgcacacctgtctcggagtaggcagctcttcctgggagctccaggctatttttgtgcttagttactggttttctccattgcattgttaggcatggtgacaagtgacagagttcttgccctctgtccagtttcagcatctggttgcttttaagccaagtacatctagtttccctattaaaaatgtgtctgaatagcgattttgctttgccaccaaaaggcttttccctgagaacagtgaaggatgtatgtcattttgtggtggttgtatgtgtccttacatagaccttaaaaagagctcacccttccaggccaatgctgaagacacagctccgcttgggagcctgagaacccaggcttcccaggccagagtgtggcttcttaaacggcaaaggaaattcctttgagtcacaagccaagttttcgccctgtctcctgagaccatttccctacgctttgctgctgctgagagttacgtgaggcacttgttaaaaattcagcctcccaggtccctcccctcggagaggctgattcactgggtctgggaaggagcctggggattttaatttttcacaagtgccccagatgattctcatcaccaagcaaattttggaaatgctgttcaacagcgcccttaaattggaaacatctttgcagctcgttttattgaaattcataatcaggggtgtcctctagctcccacggtctccagagcagcaaggccggctatggagctgccgtcgtgtgaccacagtgtgatgtctcagaagggctctgggtgggctgagcatctgggctgtgccctggctctgcttttcaccctggacaaagtcgctgtggacttcaatttcttcacctctaaaatgggggacttggaccaggtagattgctgagctcactaccaggttcaaagttcaatgacaaactcagtttactgaggtttgagagaacatccctccaggggagcctgggagctgctctcccagtctaagcatgtagatatcatcgtttgccttttgtgtgtgtgtgtcccttatttgataaaaagatgttttgagttgttttttttttaagcactcacttgtaattttagtttttaaacccaagtccctctaactttgcctttgataccaaacaattcaaaagttggatctgagtttggagaaagatatttccaacctaagtgggtattattttgaaaccagatttttaatttaatagcctatatttgtagtctgttggataggtgtttccaaagtgtgtcttctcaagtgaaaacgcaactctaggtttcaagtactccttttctccgatcctgtggtacttgaatatccaaaaaccctgcactttgaacaatcagctgttgctatctggaactaaacagaactatgagtaaaattgcctggatactttaaaaagatatttttcctccttcatctcctttgactccaggacagactggaatataagtagtgggtctgcatggatgtttcagggatcaaaggagccacctgggcgcctgagtgccaaccctcagggccacaggtgggtgtggtttgggcacgggtccaagtgactgtgacgggacccgtgggcatgggtccaggtctgtaacctgaagaagttgttttctgacaatcaccaaatcatccgaatgacatcaaaagcagcccttatctcagagactgagatttctgtggtctcaacttcgctttggtataatttctggcactcaccagcctctatcattatgactttccccccagtgtattatttctctaataggtttccttttcacgttcttttagcacagactggcactttaccctctcagtttggaagttagcccctctcctctgttacttttcccttcacccaactacagctgtgatctagaacattcatagtcatatttctgctactactaccttcatttatcaagactttttatgagaataggtaaaccaagcaataacttcctaggactgaatcaccaccccagaagagcgagaggctcctttcatatgcctgaggccacaccccttaacctgttctgacaaaatagtggctggcccatgtaccagctccattcagaaattcaggaagagaaaagacagccctgttgtcacacaaaccggtgtgggggagggtggagcctggtctgcacggcagtcctggtggcccctgtggaggacaggcagggctggcagcatagcctttgttgccacacaaccggaatttgctcccccaggactgtgggagccagtgtcccagctgaaatctttttagtgtgtggctctgaatggcactcacattccattttggctcacatgaaactaactgaagccctttgttcaagcttcaggctcttaggcatggaaatgagaatgtgactgtggctgtcttacaggaaaattcttgtttgtccctgaatgagagcacagaggcattgaattcacagagctgcaaacttgcctgataaatgagggagtggcagtttatagataggtcatcttttttccttcctccaggtgtccttgcctttcttcccaaagtcattcatttctgatgagtatatgaatccccctcttgctagtaaggttctatttgggctaaaacaaggctgaatttttaaagagtatttgaatatattttagaatcaaattgaggctataaattgcatcaatctggacaattccattgcaggaataatatgttaaaaaccaatggggagaagcacccacatctctcctgtagcactccgtgtctcataagcaatttgaagacacttacaagtaactgattccagtcaaattaggattaactgactcaaaaaatggtgtcaagtttctttaatgtttttatgttagaagtgagtttaacagacttgaagaaaactgttatcttttcctgctgtgagtttacacaaatgattccagagcagaatgaaagcagaaagctgttggttacaatattcttttaacctctctgcagcattttacacttactgggaaccttatgattcaccgtaagagtggaaatatacctgagttcgtgtcctaatggtctctaattcacattggatcgtgggcaaatcacctcacctctctgagcctgttccctcctcttagaccatctctaagaccacttcatctatttacacatcatttgcttgaacattgctgaacatctgcgtgaacttggcctctccagcccttgcaggtggaaacagctgtgtcaaggctcaaggctcacgctgaggggacttggagggagggggcttctgcattaagctttcctggtgaagacccttgatcttgtccaaagccctgtgtctttgactggcttctcttcagagtccccgttgtcatcgtaagacccttgctgtttggagggtggtcttgtgactgtggcagctgctggccgctggaatgaggagcctatctccatcctccagtgtgactcaggcagagcattgagaattcccagggcagaaatccttcctgctcaggctttcattctaaaactacagtcttcattaaagctgaactttctgggtagctgagcttatatgcccggcatctgaatgagagctctctttgtaactgtgtgacttgagatctagtttgccagctcctgggaaacaatacatgtgttcttgtttgtgtttgctcagcaagcagatgtctgagatgtaagaagcttttcttttcctgtggcattgattctgacttagagctgaagtaaaagatcactgaaacatcacgtcaagttgaagtcactcataggtctttgtcctttaggcaggacaggagagtcattaagaagcatttcactgtagcattctatcacaatatcatctggaattgttttctttgcccagaaagccttaacttgcctctagagaatccctggtattacaacgatattgcggcattagaattccaactcttctgctgtggaagtttgaagcgaagctgcagcaaaaccagagaatttcctcaagtggcctgtaggctccttgttatcttatgcccccacccctccctcaacaatatgagtgatccagaactggcccaaacacctcagctctggtccctttttgcccttcttggccttactctgttgttcaaagccactttggattgcttggatgcttcgaacagccatgaaaagtagcctgcctgtggcatttagaggccaagcaattgacagaaagggtttcttctacctctgttatctaagcagagggaagtaaacctctcaccgccccccacccctcactgcccccgattaccctagaattgctttcgccaaattgtagttgaagctaaggaaggggaatctggcccctgctgggagagggaactggaatgccacacaaggcaaggcctgcttccttccttcccctctgctgctgctgcctcggaacgctgcagcccaggcttcctcccacagtggcccttggaagcaggccgcagagtagacagctgctccttttggaagagtcagtcccctgtgttttctgaactgtttttcctagcatgtatgtgggtagagctttcatgcatctctagtaataataagctgaaattagttttttttttaattctccaatttaaaacttttaattaaaaagtaaattttaatgtcgaaaatgcaaacttggggagggcagaaagatcacacacaaggctgtcacttcatacttgcaggattgcacagcagccgggcagaggcgctcctcacttcccagatggggcggcgggcagcagagacgcacctcacttcctagacagtgcggcagccaggcacaggcacacctcacttcccagacagttgggcggccaggcaagcgctcctcacttcccagatggggcggctcccgggaagcggggctcctcacttcccagacagggtggccaggcagaggtgctcctcacttcccagaacaattctttatgaatttgataaaggactgaagtgcaactgaaagctgctagtgatgatctggtaatatacaatttgtccagtagccagtttgtttttattgtgttttctaaccataagagatcattaaaggcaaagcctgtatgacgctgtacacacacaaaaaaatggtcaccgcaggccatactaccaatgaaatggtaggtaaacaaatcttctggtcaagagaaaaaaaaaagaaatagcactctgcatgctttgctctacaagacgaatttccctagaaagaatccaatgaaggccgggcatagtggctcactcctgtaatcccagcactttggaggccgaggcgggtagatcacctgaggttaggagttcaagaccagcctggccaacatggtgaaaccccttctctactaaaaatgcaaaaattagctgggtgtggtggcgggcgcctgtaatcccagctactcgggaggctgaggtgggagaattgcttgaacccaggagacggaggttgcagtgagccgagatcacgcctctgcactccagcctgggcaacaagagtgagactccgtctccaaaaaaagaaaaggaatccagtgaaaatggctgcaattacaacaagaagtgaaggaagaagactggtgacatctctgaaggatgcagttgaggttgatccaggtttatccgaatatgctacctttctgagccttaaaccttcatctctcaggtgttgatttgcttctgatagcttcatcatttctccctgaagtcttttacactcttctgttagtttccttgtttcagtatcatgaagtgaagcactgtgtggttgtggcgtgggcccgtcttgcttagatgcattcagtgggacagctttgctgggttccatgtcattcaatttatcattttcattggggatctccatttggaatccattaattcatgaggttttgcctcattccacacagcttccatatctgaagtgtttagtggagcaaaaattgtaccataaacttgtgtttactcttttcattcggatcatagtcaaagggctgtagcattactgaaacagtcacagttgaccctgggtcaataattccactgttgggcctcacacagtaccggtgaggcacggtagtcttcactttgaaacacacttttctatccgatggatttcgcaatttaagatttgtagtgactacatctgtgaaggggcctttgaatttgaggtctatgggcgggtcgaggaccaggatctgctcgtgcttcgccgtggccccggaggcagacgccattggagagacagcgcagagcagggggcggcttgctcgctgggggcgggggacgatggcgagaggggagggggagcgagttcgcatctctccttttcctggttagactctgttcaaccacattcttatgttggcagatctgcttccagattgatttttagagcaccatcactttcacattcctgattctgattttgttttgttttgtttgggttttctgaaacttaaaatgctgccccgaaaatactatatttttgagtttgtgttctgaaagcctccgtgctgctggatctttggggggaaatacaggatccttcagcactgaggtgtttaagatttgcaactagcaatgcaattttttctaaatatggggatatttacctttattaagaaattatactaaacattgatgtccttgatcattttatgttctcatattacttttgattctactatgattgtgtggtggtgaacaaagatcattacaaacaaaaactgtaattttgttatatttgattcaatggaatttacctaaaaaataaagactaaaaatgtggtgtgaaaaaaaaaaaaaaaaaaaaaaaaaa

SEQ ID NO: 900 - protein, 425 aa, Homo Sapiens
MNAMLETPELPAVFDGVKLAAVAAVLYVIVRCLNLKSPTAPPDLYFQDSGLSRFLLKSCPLLTKEYIPPLIWGKSGHIQTALYGKMGRVRSPHPYGHRKFITMSDGATSTFDLFEPLAEHCVGDDITMVICPGIANHSEKQYIRTFVDYAQKNGYRCAVLNHLGALPNIELTSPRMFTYGCTWEFGAMVNYIKKTYPLTQLVVVGFSLGGNIVCKYLGETQANQEKVLCCVSVCQGYSALRAQETFMQWDQCRRFYNFLMADNMKKIILSHRQALFGDHVKKPQSLEDTDLSRLYTATSLMQIDDNVMRKFHGYNSLKEYYEEESCMRYLHRIYVPLMLVNAADDPLVHESLLTIPKSLSEKRENVMFVLPLHGGHLGFFEGSVLFPEPLTWMDKLVVEYANAICQWERNKLQCSDTEQVEADLE

SEQ ID NO: 901 - DNA, 4979 bp, Homo Sapiens
ggcgctctcggctagctgcagcggcggcggcgcggaggggaaggcatccaggatgcggtgcggggcggcccggtgcccccccgccccgtcacggcagccgcggcggccgaggggaccgggccagggccgggggcggcggcccgagccgcggtagcggcggcggcgggaggggcggcctgagggcggacgggcgggcgcccgggttgcgggggctcggtgccgctccgcactgcccggccggtctcggccccggcgccatgagtggcggcggcggcggagggggctcggcgcccagtcgcttcgccgactactttgtcatctgcggactggacacggagaccgggctggagccggacgagctgtcggcattatgccagtacatacaggcttctaaagccagggatggtgccagccctttcatttcaagtacgactgaaggagaaaattttgagcagacaccattgagaagaacattcaaatctaaggtccttgcacgatatcctgagaacgtagaatggaatccctttgaccaagatgcagtaggaatgctatgtatgccgaaagggctggcattcaagacccaggctgatcccagggagccccaattccatgcctttattatcacaagggaggatggctctcggacatttgggtttgccctcacattttatgaagaggtgactagcaagcagatctgcagtgcaatgcagaccctctaccacatgcacaatgctgagtatgatgtcctacatgctccccctgctgatgacagagaccagagcagcatggaggatggtgaagacactcctgtgaccaaactgcagcgcttcaactcctatgacattagccgggacactctctacgtctctaagtgcatctgcctcatcacacccatgtctttcatgaaggcatgtcggagcgtgctggagcaactccaccaggcagtcacttcacctcagccccctccactgccccttgagagctacatatacaacgtactctacgaggtgccgctcccacctcctggccggtccttgaagttttctggggtctatgggccaataatctgccagagaccaagtaccaatgagcttcccctatttgactttcctgtcaaagaggtttttgaactgctcggggtggagaatgtgtttcagctttttacttgtgcccttctggagtttcaaatcctgctctactcacagcattaccagagactgatgactgtggcggagacgattacagctctcatgtttcctttccagtggcagcatgtctatgtccctattctcccagcttctctcctgcatttcttagatgctcctgttccatacctgatgggtttgcattccaatggcctggatgaccggtcaaagctggagctgcctcaagaggctaacctctgctttgtggacattgacaaccacttcattgagttgccagaggacttgccacagttccccaacaaattggagtttgtccaggaagtctctgagattctcatggcatttggaattccccctgaagggaatcttcattgcagtgagagtgcctccaagctgaagaggctgcgggcctctgagcttgtctcggacaagaggaatgggaacattgctggctcccctttgcattcctacgagcttcttaaggagaatgaaactattgcccggctgcaagccttggtcaagagaactggggtgagcctggaaaagttggaagtgcgtgaagaccccagcagcaataaggatctcaaagttcagtgtgatgaagaagaactcaggatttaccagctaaacattcagatccgggaagtttttgcaaatcgtttcactcagatgtttgcagattatgaggtgtttgtcatccaacccagccaggataaggaatcctggtttaccaacagggagcaaatgcaaaactttgataaagcatcttttctgtcagatcagcctgagccctacctgcccttcctctcaagattcctggagacccagatgtttgcatctttcattgacaacaaaataatgtgtcatgatgatgatgataaagaccctgtactccgggtatttgattcccgagttgacaagatcaggctgttgaatgttcggacacctactctccgtacatccatgtaccagaagtgtaccactgtggatgaagcagagaaagcaattgagctgcgtctggcaaaaattgaccatactgcaattcacccacatttacttgacatgaagattggacaagggaaatatgagccgggcttcttccctaagctgcagtctgatgtactttccactgggccagccagcaacaagtggacgaaaaggaatgcccctgcccagtggaggcggaaagatcggcagaagcagcacacagaacacctgcgtttagataatgaccagagggagaagtacatccaggaagccaggactatgggcagcactatccgccagcccaaactgtccaacctctctccatcagtgattgcccagaccaattggaagtttgtagagggcctgctgaaggaatgccgcaataagaccaagaggatgctggtggaaaagatgggccgagaagctgtggagctagggcatggggaggtgaacatcacaggggtggaagagaacaccctgattgccagcctttgtgatctcctggaaaggatctggagtcatggactacaagtgaaacaggggaaatcagccttatggtcccacctgttacattatcaggacaaccggcagagaaaactcacatcaggaagcctcagtacctcaggaatacttcttgattcagaacgtaggaagtctgatgccagctcactcatgcctcccctgaggatctccctgattcaggatatgaggcacatccagaacatcggggaaatcaagactgatgtgggaaaggccagagcatgggtgcgactgtccatggaaaaaaagttactttccagacacctgaagcagctcctctcagaccatgagctcaccaaaaagttatataagcgctatgccttcctgcgctgtgatgacgagaaggagcagttcctctatcacctcctgtctttcaatgccgtcgattacttttgcttcaccaatgtcttcacaactatcctgatcccgtaccacattctgatcgtaccaagcaagaagctggggggctccatgttcactgccaacccatggatctgtatatcaggagaattgggtgagacacagatcatgcagattcccaggaatgtgctagagatgaccttcgagtgccagaacttggggaagcttactactgtccagattggccatgataactctgggctgtatgccaaatggctggtggagtatgtgatggtcaggaatgagatcacaggacatacctacaagttcccgtgtggccggtggttagggaagggcatggatgatggaagcctggagcggatcctagttggggagctgctcacatcccagcctgaggtggatgagaggccatgccggaccccgccgctgcagcagtcccccagtgtcatccggaggcttgttaccatctcacccaacaacaagcccaagctgaacactgggcagatccaggagtccatcggggaggcagtcaatggcattgtgaagcacttccataagcctgagaaagagcgaggcagtctgacgctgttgctctgtggagagtgtggccttgtctcggccttggaacaggctttccagcatggatttaaatcgccccggctcttcaaaaatgtcttcatttgggatttcctggaaaaagcacaaacctattatgagacattagagaagaatgaagtagtccctgaggaaaactggcatacaagagcccggaacttctgccgatttgtcactgcaatcaacaatactccccggaacatcggcaaggatggcaagtttcagatgctggtgtgcttgggagccagagatcacctcctacaccactggattgccctgctggctgactgccccatcactgcacacatgtatgaggatgtggcactgatcaaagaccatacacttgtcaattccttgattcgtgtgctgcagacattgcaggagttcaacatcacgctggagacgtcccttgtcaagggcatcgacatctgacctcccagcaccagccagcagcaggactgagaaagactcaccctgcagctctgaccttttttcccaaagggacttaagcgattgtgcaggagtaggagacaaaatgtacactcactgtaaaaagaaaactagaggatttttggaataaataatctattttagagtttatttgctgatttgctttttacacactttcatgtgaaagagtgatagggagagggagcgaggctggtgccgcttattttgaagctggtgccctccctcgccgtggccacatgctggaagcctgaggcctccctggactgagcctgtggcactgcgtgcgggacagttatgtttccttgccccgtcgcattaatgaggcccttccacatcatttttaaactaatgtttttctatattaacattattatggatatttggctttcataggccacacacaggtgtgctgcgcgggaagccccatgctccaatcaaagggatttttagtagtgcctctaagcaagcaccgatgagtcagtcccacgtattttcttttttgtcagtattgtttgggaaggagacatgccgggatgtgtcatcgtgccaaataccacatttcctgttggcacagtttcacagaagtaaacataagcatgttttaacaggtttttcttttcttttttcttttttaaaatgttttatttatttaacccgccattgtgtgtttttaagtattttctttttttaaggaaaggaaaagcttgtcacaatctaactggctatgttattattattaaatttatgttttgcaacttagaaaccagctacagtatggcccacttaataaaacacctgaaacaaaaaaaaaaaaaaaaa

SEQ ID NO: 902 - protein, 1287 aa, Homo Sapiens
MSGGGGGGGSAPSRFADYFVICGLDTETGLEPDELSALCQYIQASKARDGASPFISSTTEGENFEQTPLRRTFKSKVLARYPENVEWNPFDQDAVGMLCMPKGLAFKTQADPREPQFHAFIITREDGSRTFGFALTFYEEVTSKQICSAMQTLYHMHNAEYDVLHAPPADDRDQSSMEDGEDTPVTKLQRFNSYDISRDTLYVSKCICLITPMSFMKACRSVLEQLHQAVTSPQPPPLPLESYIYNVLYEVPLPPPGRSLKFSGVYGPIICQRPSTNELPLFDFPVKEVFELLGVENVFQLFTCALLEFQILLYSQHYQRLMTVAETITALMFPFQWQHVYVPILPASLLHFLDAPVPYLMGLHSNGLDDRSKLELPQEANLCFVDIDNHFIELPEDLPQFPNKLEFVQEVSEILMAFGIPPEGNLHCSESASKLKRLRASELVSDKRNGNIAGSPLHSYELLKENETIARLQALVKRTGVSLEKLEVREDPSSNKDLKVQCDEEELRIYQLNIQIREVFANRFTQMFADYEVFVIQPSQDKESWFTNREQMQNFDKASFLSDQPEPYLPFLSRFLETQMFASFIDNKIMCHDDDDKDPVLRVFDSRVDKIRLLNVRTPTLRTSMYQKCTTVDEAEKAIELRLAKIDHTAIHPHLLDMKIGQGKYEPGFFPKLQSDVLSTGPASNKWTKRNAPAQWRRKDRQKQHTEHLRLDNDQREKYIQEARTMGSTIRQPKLSNLSPSVIAQTNWKFVEGLLKECRNKTKRMLVEKMGREAVELGHGEVNITGVEENTLIASLCDLLERIWSHGLQVKQGKSALWSHLLHYQDNRQRKLTSGSLSTSGILLDSERRKSDASSLMPPLRISLIQDMRHIQNIGEIKTDVGKARAWVRLSMEKKLLSRHLKQLLSDHELTKKLYKRYAFLRCDDEKEQFLYHLLSFNAVDYFCFTNVFTTILIPYHILIVPSKKLGGSMFTANPWICISGELGETQIMQIPRNVLEMTFECQNLGKLTTVQIGHDNSGLYAKWLVEYVMVRNEITGHTYKFPCGRWLGKGMDDGSLERILVGELLTSQPEVDERPCRTPPLQQSPSVIRRLVTISPNNKPKLNTGQIQESIGEAVNGIVKHFHKPEKERGSLTLLLCGECGLVSALEQAFQHGFKSPRLFKNVFIWDFLEKAQTYYETLEKNEVVPEENWHTRARNFCRFVTAINNTPRNIGKDGKFQMLVCLGARDHLLHHWIALLADCPITAHMYEDVALIKDHTLVNSLIRVLQTLQEFNITLETSLVKGIDI

SEQ ID NO: 903 - DNA, 2867 bp, Homo Sapiens
ggtgtttggagagcccggactggatgcccactagaatcctgtgctgtgaacagtgagagagttttcttcattttgaggaaccctaaacacctatctttcccaaggcaacctgtctggactgagcatttctctgacttgacataacttcccatccagccaggagtctgcactcttcagtctttgcaggcagtagcagaatcccatggtagccaggtgggtgaaggggagcgaggacgttctacctgccttgaagaagacacctgacctgcggagtgagtgaccagtgtttccagagcctggcaatggatgccattcacatcggcatgtccagcacccccctggtgaagcacactgctggggctgggctcaaggccaacagaccccgcgtcatgtccaagagtgggcacagcaacgtgagaattgacaaagtggatggcatatacctactctacctgcaagacctgtggaccacagttatcgacatgaagtggagatacaaactcaccctgttcgctgccacttttgtgatgacctggttcctttttggagtcatctactatgccatcgcgtttattcatggggacttagaacccggtgagcccatttcaaatcataccccctgcatcatgaaagtggactctctcactggggcgtttctcttttccctggaatcccagacaaccattggctatggagtccgttccatcacagaggaatgtcctcatgccatcttcctgttggttgctcagttggtcatcacgaccttgattgagatcttcatcaccggaaccttcctggccaaaatcgccagacccaaaaagcgggctgagaccatcaagttcagccactgtgcagtcatcaccaagcagaatgggaagctgtgcttggtgattcaggtagccaatatgaggaagagcctcttgattcagtgccagctctctggcaagctcctgcagacccacgtcaccaaggagggggagcggattctcctcaaccaagccactgtcaaattccacgtggactcctcctctgagagccccttcctcattctgcccatgacattctaccatgtgctggatgagacgagccccctgagagacctcacaccccaaaacctaaaggagaaggagtttgagcttgtggtcctcctcaatgccactgtggaatccaccagcgctgtctgccagagccgaacatcttatatcccagaggaaatctactggggttttgagtttgtgcctgtggtatctctctccaaaaatggaaaatatgtggctgatttcagtcagtttgaacagattcggaaaagcccagattgcacattttactgtgcagattctgagaaacagcaactcgaggagaagtacaggcaggaggatcagagggaaagagaactgaggacacttttattacaacagagcaatgtctgatcacaggggcgccatccaggtttaaccctgcaagctgtttccacatcagaactcccttcaaacacaaagattgctgtgaaaacgaaaatgtgtagacgcactctcaaaaactgcacggacatacaaaatcaatcttttcctttgatcttgtggctaaaccagcatttctgtgtttgagagatttcctgttaggtgcttcgtctgaaagtgaactctcataattcaaattgtataaaataaagctacatttctaagagcttggtgtagggcaattggaataatgtcctgttagataaacagacatttagcaatcctgacattaaaaggaaatgtatttctatacaagattattagctgtaatacaagatatttatttaaccaatgaccttatggctgagagttgaattgtggttcagtattcattgatctcactgctttaaaacatgctctttttgttcaagcaggaaaaatattatatctaattatgtctatgtggtaatacctaaaaagaggtagagagactctatgttcacaaaatatagtaatttcatttttacctttcttcagtggactgaattgtatggaaggaaattgatcagatctgtaattcacaactgtggaaacctacacaaatggggctgatgccattgtttcctctattttattttatttatttttgaatccactatctctttccattcaaaatatttccattcaaaatgtggttcacagacccgccacatcagcaccatccgagagcttattagtaatgtgtagattctcatgtcccagccagacttacagaattggggtctgtatcttaacaagaaccccagatgatttgtgtacaaatgaaagttcgaaagctgtgctctggacagtgttctcaaagcaactttctgaagccgtgtggaaaactgactctgtgtgggtcccgtatccctgtggcatccagacctggcctctcttcatttcattattattggccaatatttctttcagccatttcatttcttatctattaaaatggcttgcccataaaggaactgcataggattatcccctgacattccaagagcaaaataaagctcttgagagtaattgttgtctcagtcatgcttgctgattacagttagcacaaaagaaaaattcagctgcctgacaatacaggaaatgttctcagatgctgatgtttgtaaggtccggtggggccatgaggaagaagaggagctgaaggtaagaaactcataaacaagatgactctttgatgcatgaacaagatttgaaaatctcaagcctgtaaagaatacccctgctatttaaataaagctcataccaagaggtaacattttgccccgggccaaattcaggggtctagtgccctgcattcctttgaggcaaaaaataaatgggctatgactggttaaatgtccaaaa

SEQ ID NO: 904 - protein, 375 aa, Homo Sapiens
MDAIHIGMSSTPLVKHTAGAGLKANRPRVMSKSGHSNVRIDKVDGIYLLYLQDLWTTVIDMKWRYKLTLFAATFVMTWFLFGVIYYAIAFIHGDLEPGEPISNHTPCIMKVDSLTGAFLFSLESQTTIGYGVRSITEECPHAIFLLVAQLVITTLIEIFITGTFLAKIARPKKRAETIKFSHCAVITKQNGKLCLVIQVANMRKSLLIQCQLSGKLLQTHVTKEGERILLNQATVKFHVDSSSESPFLILPMTFYHVLDETSPLRDLTPQNLKEKEFELVVLLNATVESTSAVCQSRTSYIPEEIYWGFEFVPVVSLSKNGKYVADFSQFEQIRKSPDCTFYCADSEKQQLEEKYRQEDQRERELRTLLLQQSNV

SEQ ID NO: 905 - DNA, 3646 bp, Homo Sapiens
acatgcgtcccgagcccgccagaagctgctaggctgaggctgctgtcccggcgggagctgtggcgcggagcggcccctctgctgcgtctgccctcgttttgtctcacgactcacactcagtgctccattccccaagagttcgcgttccccgcgcggcggtcgagaggcggctgcccgcggtcccgcgcgggcgcggggcgatggcggcgcgggggtcagggccccgcgcgctccgcctgctgctcttggtccagctggtcgcggggcgctgcggtctagcgggcgcggcgggcggcgcgcagagaggattatctgaaccttcttctattgcaaaacatgaagatagtttgcttaaggatttatttcaagactacgaaagatgggttcgtcctgtggaacacctgaatgacaaaataaaaataaaatttggacttgcaatatctcaattggtggatgtggatgagaaaaatcagttaatgacaacaaacgtctggttgaaacaggaatggatagatgtaaaattaagatggaaccctgatgactatggtggaataaaagttatacgtgttccttcagactctgtctggacaccagacatcgttttgtttgataatgcagatggacgttttgaagggaccagtacgaaaacagtcatcaggtacaatggcactgtcacctggactccaccggcaaactacaaaagttcctgtaccatagatgtcacgtttttcccatttgaccttcagaactgttccatgaaatttggttcttggacttatgatggatcacaggttgatataattctagaggaccaagatgtagacaagagagatttttttgataatggagaatgggagattgtgagtgcaacagggagcaaaggaaacagaaccgacagctgttgctggtatccgtatgtcacttactcatttgtaatcaagcgcctgcctctcttttataccttgttccttataataccctgtattgggctctcatttttaactgtacttgtcttctatcttccttcaaatgaaggtgaaaagatttgtctctgcacttcagtacttgtgtctttgactgtcttccttctggttattgaagagatcataccatcatcttcaaaagtcatacctctaattggagagtatctggtatttaccatgatttttgtgacactgtcaattatggtaaccgtcttcgctatcaacattcatcatcgttcttcctcaacacataatgccatggcgcctttggtccgcaagatatttcttcacacgcttcccaaactgctttgcatgagaagtcatgtagacaggtacttcactcagaaagaggaaactgagagtggtagtggaccaaaatcttctagaaacacattggaagctgcgctcgattctattcgctacattacaagacacatcatgaaggaaaatgatgtccgtgaggttgttgaagattggaaattcatagcccaggttcttgatcggatgtttctgtggacttttcttttcgtttcaattgttggatctcttgggctttttgttcctgttatttataaatgggcaaatatattaataccagttcatattggaaatgcaaataagtgaagcctcccaagggactgaagtatacatttagttaacacacatatatctgatggcacctataaaattatgaaaatgtaagttatgtgttaaatttagtgcaagctttaacagactaagttgctaacctcaatttatgttaacagatgatccatttgaacagttggctgtatgactgaagtaataactgatgagatacatttgatcttgtaaaaatagcaaaatattatctgaactggactagtgaaaaatctagtatttgtatcctggcaaataatactaatttataatccacagtaaagttcatcctttgactgtgctggagaattccagttgtatttgaagactgattttaaaacttttctgcatttggtaaaggtatgtaaactttcctgtactcactgagtaacagctaatctttaatataatattatactgctatatttaaaaagctgactacttgatataattacttaatgtgatgcttgatataataattacttaatgtggccgggcacggtggctcacacctgtaatcccagcactttgggaggtcgaggtgggcgtatcacctgaggttgggagttcgagaccagcctgaccaacgtggagaaaccccgtctctactaaaaatatgaaattagccagggtggtggtgcacacctgtaatcccagctacctgggaggctgcggcaggagaatcgcttgaacccaggtggcggaggttgcggtgagctgagatcacgccattgcactccagcctgggcaacaagagcaaaactcagtctcaaataataataataacaacaacttaatgtgctgctgcttttccataaccaacattttaaaaataaatgaaaaacaggaattgggaactcctttaaggcttactttattctttagatgcttaattattgtgttaactatttctgtagcttagcttccactgtaaagtcatacagtagacaactcctgtggacacgcagtagcatatccttaacattaatttcagtcctcttgtccacatttcccacaattaatagaaccatcttctatataaattgtggtagtatctctttatccttgatcttagaatagtcagtccactacaattacatgaaccccatttaaaaaacatatttagggccgggggcagtggctcacatctgtaatccaagcactttgggaggctgaggcaggtggatcaccagaggttaggagttcgagactagcctgaccaacatggtgaagccccgtctctactaagaatacaaaaaattagtcgggcatggtagcaggcgcctgtagtcccagctactcaagaggctgaggcaggagaatcgcttgaacctgggaggtggaggctgcagtgagccgagactgcgccattgcactccagcctggcaacaagagcaaaactctgtctcaaacatattttggtctaaatcattctgtgagaaaacaatcttctaatatgaaacacagtattctaatttggtatatgcacactgttatatacctgtaatatttcagttttctctccttcattctaacaattacaataatagaatcttagagttgcaagggcctttagatgtaatcaatcttagcctattactagtacagcgtaaatgatttagtacagtataatgtatcacagttaaaacagttaaattccatctctaaatgtcaccacttcaggtgtgaccaggtagcaaacactgacagaaaccctcgttcaatttagaactcttagctgttgagatcacaaacacctcatttatttataataagtaacctatctaagttcaagccaatgctctttggaaggcggaggagaccctatctaatttgcatttaatcgtaggcaggtgtttaatgccatttaatgagtgaaagcctggtgtgatgaatttagattgcctgccagctacctaccttagttcgtatacatccctgatccctcttatactaccattactgttacttatgatttttatatataaatttttatcgacaaaaaaaaaaaaaaaaaaaaaaaa

SEQ ID NO: 906 - protein, 468 aa, Homo Sapiens
MAARGSGPRALRLLLLVQLVAGRCGLAGAAGGAQRGLSEPSSIAKHEDSLLKDLFQDYERWVRPVEHLNDKIKIKFGLAISQLVDVDEKNQLMTTNVWLKQEWIDVKLRWNPDDYGGIKVIRVPSDSVWTPDIVLFDNADGRFEGTSTKTVIRYNGTVTWTPPANYKSSCTIDVTFFPFDLQNCSMKFGSWTYDGSQVDIILEDQDVDKRDFFDNGEWEIVSATGSKGNRTDSCCWYPYVTYSFVIKRLPLFYTLFLIIPCIGLSFLTVLVFYLPSNEGEKICLCTSVLVSLTVFLLVIEEIIPSSSKVIPLIGEYLVFTMIFVTLSIMVTVFAINIHHRSSSTHNAMAPLVRKIFLHTLPKLLCMRSHVDRYFTQKEETESGSGPKSSRNTLEAALDSIRYITRHIMKENDVREVVEDWKFIAQVLDRMFLWTFLFVSIVGSLGLFVPVIYKWANILIPVHIGNANK

SEQ ID NO: 907 - DNA, 8351 bp, Homo Sapiens
ctgccgtcgtggaagcaggatttccgcggttgtgtaacggcctgtcgcaggcgtgcagggacctggactccgcctcgtccccggggctcgggcagccgagccatggcggggaactgtggggcccgcggcgcgctgtcggcgcacacgctgctgttcgacctgccgcccgcgctgctcggagagctctgcgctgttctggacagctgcgacggcgcgctgggctggcgcggcctggcagagagactttcaagcagctggctggatgttcgtcatattgaaaagtatgtagaccaaggtaaaagtggaacaagagaattactttggtcctgggcacagaaaaacaagaccatcggtgaccttttacaggtcctccaggagatgggacatcgtcgagctattcatttaattacaaactatggagcagtgttgagtccttcagagaagagttatcaggaaggtggatttccaaatatattattcaaggaaacagccaatgtcaccgtggataatgttcttattcctgaacataatgaaaaaggaatactgcttaaatcttccatcagctttcaaaatatcatagaaggaactagaaatttccacaaagacttcctaattggagaaggagagatttttgaggtatacagagtggagattcaaaacctaacatatgctgtcaaattatttaaacaggagaaaaaaatgcagtgtaagaagcattggaagaggtttttatctgagcttgaagttttactactgtttcatcacccaaacatactagagttggctgcatattttacagagactgagaagttctgtctgatttatccatacatgagaaatggaacactttttgacagattgcagtgtgtaggtgacacggccccactcccttggcacattcgaatcggtatattaataggaatatccaaagccattcactacctgcacaacgttcaaccatgctcggtcatctgtggcagtatatcaagtgcaaacatccttttggatgatcagtttcaacccaaactaactgattttgccatggcacacttccggtcccacctagaacatcagagttgtaccataaatatgaccagcagcagcagtaaacatctgtggtacatgccagaagagtacatcagacaggggaaactttccattaaaacagatgtctacagctttggaattgtaataatggaagttctaacaggatgtagagtagtgttagatgatccaaaacatatccagctgcgggatctccttagagaattgatggagaagagaggcctggattcatgtctctcatttctagataagaaagtgcctccctgccctcggaatttctctgccaagctcttctgtttggcaggccggtgtgctgcaacgcgggcaaagttaagaccatcaatggatgaagttttaaatactcttgaaagtactcaagccagcttgtattttgctgaagatcctcccacatcactaaagtccttcaggtgtccttctcctctattcctggagaatgtaccaagtattccagtggaagatgatgaaagccagaataacaatttactaccttctgatgaaggcctgaggatagacagaatgactcagaaaactccttttgaatgcagccagtctgaggttatgtttctgagcttggacaaaaagccagagagcaagagaaatgaggaagcttgcaacatgcccagttcttcttgtgaagaaagttggttcccaaagtatatagttccatcccaggacttaaggccctataaggtaaatatagatccttcttcagaagctccagggcattcttgcaggagcaggccagtggagagcagctgttcctccaaattttcctgggatgaatatgaacagtacaaaaaagaataaattctaccagaagataaagaaaaaagcaagtattgcataggcacctgagcataggtatgaccttgggaagacattggctccataagcaatgccaagagaatgatcaatagtgagtttgggtgatgcagataaacaatctggataattccatttcttttttcccaaaccctcaaacagagtgccttaaaaaattgttttatcaggataattgtctcatgaccaaatccacgctcaattagagccattcaaaattccttaagatcatgggttctgacttcagccaaacaaaacaatcaaaacctaccaaaaagggactggattgtaatgtcctctccatcatcctcagtgtgagtcctcagagcctccatctgccaagaacattcagttggattccatcgtttggtttagcttgcttgcacgggttgtaggaaatgtctaatttgtaaatgttaatagatacctttggaaagaatcaccttgttattctgattgacccctcttgttttttggttaatccctgactagcctgcttgtctgaaaatgagccaggttcacccttagctacggcatgctctgggttgaaaggggatttcttcccaagatctatcctaaactcttaggacagtttatcctgtattgactattattacagctttttaaaaacagacttagtgacctattatatcttaaggagactatgtgaaatgtccatcaagtaatttttattcctgagaaaatggctggtcaagggcctaggtcagctttttgtttaatctacacctttcaactctgggccttcattcctgctgtttcttggatctccctcttttgaaatcctaccaatcatcagagctctacaaaacagccacctcctggaagcttccctaatctctacaaccagaagtactccctttatcagtatttccacagcaatttctttgtatttctattttatatttatcactttctgaattatatcaaagctgcttgtcttatctctttttttttttgagacggagtctcgctctgtcatccaggctggagtgcagtggcacaatctcggctcaccgcaaggtctgcctcccgggttcacgccattctcctgcctcagcctcccgagtaaaggtgggactacaggcgcccgccactacgcccggctaattttttgtatttttagtagagacggggtttcaccatgttaggcaggatggtctcgatctcctgacctcatgatccgcctgcctggcctcccaaagtgctgggattacaggcgtgagccaccgcgcccagccttcatctcttttactaggttgtaaactccctatattagttttctattgtttttgtaacacattatcacaaatttagtgacttaaagtaacataaattaattattttgcagttctggaggtcagaattccttagcattctttctggaggctgttggggagaactcactgccttgccttttccagcttctagaggccacctgccttctttggctcatggcctcttcctccgtcttcaaagccagcaacgtgacatttcagatctccctctctctgtctgtctcaccgcatctcttcactaccctcttcctctcattctggcccttctgcatgtcttttataaagacctttgtgatttcactgggcccactcatataagccaggaaaatctctgtgtctcagatccttaatttaattacacctgcaaagtccgttttctcgtgtaaagtaacatattcacaggtttctggaattgggacgtggacatcttcgggggaccattactctgtctgtcatactccctgagtgtgtaagggccatctcttcagagcctaatgtgtcatcctacacagagcaggtgtttccttataaattaagttgaattaaattacccctatgaagccacataatcaataattcagctataataaacattgccgaataaattaacaaagggaggataatgactccttatgatgatggatagaaacactgaagaaaaccattttcagaggatttactgaattttcctctccaaggagcttgtaatagaagggtaaacctctagtttcttgtccagcagaggaataggctcatgtcttttgttttattttatttttttggtgagtcagtatggttgggttaatcatattcacattagattccatgttgaagaacaactaatcaaagaagaaaatcatcaggaatcagggtgagattaacagaccaaggtcagaaacatggagttacaattttccaaaaaagcacgaagtgagattaaaaccacagtaagtcttagtctgactgacaggctttatacaggccctcggtaagcagttgggagaacccatgcccaccactgctctgtacggtatctggctgctcagagctctctgattcacaaaagagatcatcaagaattgactctgtgttaaactgtttttcacttagaatatggacccccaccaatacattcaatgaagggtcattaaggaagctctgattaacaccaggcccatgcagttactccgcacatataatctgtgggtattatgttgatttgaacttgcttagctgacttaaagcagggtttctcaaactgtagtatgcatcagaatgacttggaaagctggttaaaaacgcagattgctgggtccacccagcttctgatgcaataggtctggggttagaaattttgctttctaatgagttcccaggtgatgctgatgccaatgatgtgaagcccgctcttcacatccgtgaaaatcgctgccttaaggtgctcttaaattgttatagattggtagatcctacctttccatcactggtatgttttttgagaaaaggatcctttcttttcattctgttatattcatcctattacataggatgttggttagcacagagtgggagctctagaaagattgttgaccaatcatcttattgactagaccatctttctagagtataactattttggacacctcaaagatgaagtcagataagctggcagtgacctgattaacgttgtggtaagcagatgccactgtggctgggaagtaccaaatcttctgttgagtgattcagtcttcctgactagatttgccttctagtgggtgtattaataagcgttagttgatatgaattaaatgttgcaactttctatgggtaataagaggatacctttatagtttcatgatgtggagaccaagatacataagaaagcaagaatgagtctccgggtgttccctctgatcagcaaacatgaattcataatttcatttactctcatttttgtaatgcactctgagcaatcctccaggcagatcctatttactaagcttcaggcttttgtcccattttataatgcccaaacacatggagaaaacattttgttgtttttaaaaacaggtatgggatttctgatataatcaattttattgacttcttgggagttgtaatgatctgtgactcactgcataatattgtagttttatagggtggcacatcaccctgtgtaaaacaactttaatgacctgaggactgatgagtacaggaagtgaggtttatcatgagtagcatttattaagcatctgctagaatcaaagcactgcattagctactaaggtacaaagtaagacacagtttaataaggaagacagggcatctacccaagtcaacagttcagtgacatctgttatttgaaccacacaccaatgcaaccgaagtaaatgctgaaagggtgagaagaaggaatagattactatgcatttttgagaggatgaagaaggcttcttggagaaggtttctgaaaagagatacggaattaagagaaatagaaaagagcactgacgaagcactcaggatggctattcaaggaattggggatccacagcagctgtgcacaaccatccctaatgccagaaaaatggggtaagggtgaagggaactgggtctagagctttgcatgtttttttctggttaacccttagagtcaccctgaaggtgtggatcccatcttataataaggtgaggacactgagtcaggaaactaacttgctaaaatcaagtcctcccagtcctcccatcaggtccttccagatctggaggagccaggatttgaactcacatttgtctgacttcaaaatccatgctttttcttgtgttccaaattgcacaatggagtcactgccagttcaagctcctatgaaaagggatggatgtgaaaagtcatttgttgattccacagatttttagtaggtaccatgtctcctgcctttatcactatcctactcctctgctacaacttctctgctacaggcacccactgcagttacttgatatgagttaaatgaatccatccatccaaacttccattcattgaataaatacttagcaatggcttcctttgtatcaggcactattctaggagctggggctacagtgcagatggaaaccagcaaagctcactgccctcatggagcttatatgtaagtgaataaatctcagggtggttctcctgtcataggtcctggctcctctgccagctcttccaaatgggttcagagaggttttctccttgtcctgttgtgtaactgataatcccatggtggacctcactttgctattcatatgcactaagtagtttatggtgtgctttgtggctggcaattgtgacagattctattcttctattggtatgtggtttctttggggcatttgtttggatactgatggcatcttccgggggtctgaggcacctacacaaacctcaggtcactatcacgtgatactggagttgcctgttaaattatatttcttcttccacaaaactgcaggttccctgagggaaaggtctatgtcctgctcatttttggatccctaatggctggcacagtacctggtgcataatatggttcaacaaatatttgtaaaatgaatgaatcaaatagtccttcaaagcatcttcagaatcaagattgtcatctagattgcacccgaagtttatctttctagtattcagaatataatcaatcattgcttaaattattccatttcatcattcttgaataaaagctactaattttaaatactaatatctgagatatcttcgaaaagaagattagtcgttgtatgtgttgcttataaattttctctatggtggaaaatattcccaaaccatgtctaagcaatgaaaaaccagtgttctggcaggaaataaactgatgtttgttgtgttttgtatctgtcttcccgttccaaatcatttatatatacttgatggtctgtgggcttgacttgcaagtattttcctgggagacatttttattcaaaagacctgtattgcctgccaaaccttcatttaagagactcattatggatgtcatctgcatcattgcaaacttttctggtcgtctctataaatagcaagataatatttacagagttttacattggctcttgaattttaaaatattcttatagacaaacattaattggaatggggggtaaggaggtaggaatggcttacttgcggaaatgcaggctcattgttgtgtctagtaggtgctaggtgcattcacacatctcttaagctttaaacaacctattgagccggtttccatttccttgatctattagatttaaaaaaatgaagcataaaggagttggctcttgccctaagtcatactactgatggaatgagaatacaaaccaaaaacactttattcaagtccaggaaatatctgccttgaaaaagaataacttaaaaattaaaagtgtcctctatttgaacatgaaaacagctaataaagatgtgttattttattttattattattaattttgtcctcccatattggcaaagataaagcaattgacaaaaatggaattcttgttcaatactggcaggagtgaaaattggtagaacctttctagaaggcaatttggcaacatgtatgaaaacctaaatgttgatacacctttacccagcagtttgtttaggaatttatcctaatgaataaaagttgtccaagtcttcaaacatgagcccaaaggtatatttcatgatgtttatgatattaaaacattggaaacaactgaaacatccttcagtaaaagatggattaaataaattccatgcagttgtcatttaaaaatatttagatatatgtttattgctatggatatatgttcccaaaatattattgaatcaaaaagtagactacaggatatatgttgaatatgagctcatttataacattgaatattttaagataatgtatgtttcatagagagatcttcaccaaatgttaaggatttttttttctgggctgtggtatttgggtgatctttacattcttcagactcatgtgtgtttgaaactttttataatgaacatatatcatttttattagaaaagaataaagtttttgaaaaaaaaaaaaaaaaa

SEQ ID NO: 908 - protein, 596 aa, Homo Sapiens
MAGNCGARGALSAHTLLFDLPPALLGELCAVLDSCDGALGWRGLAERLSSSWLDVRHIEKYVDQGKSGTRELLWSWAQKNKTIGDLLQVLQEMGHRRAIHLITNYGAVLSPSEKSYQEGGFPNILFKETANVTVDNVLIPEHNEKGILLKSSISFQNIIEGTRNFHKDFLIGEGEIFEVYRVEIQNLTYAVKLFKQEKKMQCKKHWKRFLSELEVLLLFHHPNILELAAYFTETEKFCLIYPYMRNGTLFDRLQCVGDTAPLPWHIRIGILIGISKAIHYLHNVQPCSVICGSISSANILLDDQFQPKLTDFAMAHFRSHLEHQSCTINMTSSSSKHLWYMPEEYIRQGKLSIKTDVYSFGIVIMEVLTGCRVVLDDPKHIQLRDLLRELMEKRGLDSCLSFLDKKVPPCPRNFSAKLFCLAGRCAATRAKLRPSMDEVLNTLESTQASLYFAEDPPTSLKSFRCPSPLFLENVPSIPVEDDESQNNNLLPSDEGLRIDRMTQKTPFECSQSEVMFLSLDKKPESKRNEEACNMPSSSCEESWFPKYIVPSQDLRPYKVNIDPSSEAPGHSCRSRPVESSCSSKFSWDEYEQYKKE

SEQ ID NO: 909 - DNA, 3936 bp, Homo Sapiens
agtcaccttttcgtgggttcctctcacagcgctcggccgtcgagcggggtcgctaacccgcactctcttcggacctacgacatcgcggcttctctggcgttggccagtcagccacagggaactagtaaaaaaagaaaaagaaaaaataaagtgaaagaggcgtgttgtctagtttcaaaggagaggagagaagagactgagtcgccctgtgttgcccaggctggtcttgaactcctaggctcaagagatcctcctgcctcagcctcccaaagtgctgggattacaggcaactctggtagctctccttgtctggttgttttgaagaaagaagagtagaagaaaaagttgagtaaatcatgtcggagttactggacctttcttttctgtctgaggaggaaaaggatttgattctcagtgttctacagcgagatgaagaggtccggaaagcagatgagaaaaggattaggcgactaaagaatgagttactggagataaaaaggaaaggggccaagaggggcagccaacactacagtgatcggacctgtgcccggtgccaggagagcctgggccgtttgagtcccaaaaccaatacttgtcggggttgtaatcacctggtgtgtcgggactgccgcatacaggaaagcaatggtacctggaggtgcaaggtgtgcgccaaggaaatagagttgaagaaagcaactggggactggttttatgaccagaaagtgaatcgctttgcttaccgcacaggtagtgagataatcaggatgtccctgcgccacaaacctgcagtgagtaaaagagagacagtgggacagtccctccttcatcagacacagatgggtgacatctggccaggaagaaagatcattcaggagcggcagaaggagcccagtgtgctatttgaagtgccaaagctgaaaagtggaaagagtgcattggaagctgagagtgagagtctggatagcttcacagctgactcggatagcacctccaggagagactctctggataaatctggcctctttccagaatggaagaagatgtctgctcccaaatctcaagtagaaaaggaaactcagcctggaggtcaaaatgtggtatttgtggatgagggtgagatgatatttaagaagaacaccagaaaaatcctcaggccttcagagtacactaaatctgtgatagatcttcgcccagaagatgtggtacatgaaagtggctccttgggagacagaagcaaatccgtcccaggcctcaatgtggatatggaagaggaagaagaagaagaagacattgaccacctagtgaagttacatcgccagaagctagccagaagcagcatgcaaagtggctcctccatgagtacgatcggcagcatgatgagcatctacagtgaagctggtgatttcgggaacatctttgtgactggcaggattgccttttccctgaagtatgagcagcaaacccagagtctggttgtccatgtgaaggagtgccatcagctggcctatgctgatgaagccaagaagcgctctaacccatatgtgaagacttaccttctgcctgacaagtcccgccaaggaaaaagaaaaaccagcatcaagcgggacactattaatccactatatgatgagacgctgaggtatgagatcccagaatctctcctggcccagaggaccctgcagttctcagtttggcatcatggtcgttttggcagaaacactttccttggagaggcagagatccagatggattcctggaagcttgataagaaactggatcattgcctccctttacatggaaagatcagtgctgagtccccgactggcttgccatcacacaaaggcgagttggtggtttcattgaaatacatcccagcctccaaaacccctgttggaggtgaccggaaaaagagtaaaggtggggaagggggagagctccaggtgtggatcaaagaagccaagaacttgacggctgccaaagcaggagggacttcagacagctttgtcaagggatacctccttcccatgaggaacaaggccagtaaacgtaaaactcctgtgatgaagaagaccctgaatcctcactacaaccatacatttgtctacaatggtgtgaggctggaagatctacagcatatgtgcctggaactgactgtgtgggaccgggagcccctggccagcaatgacttcctgggaggggtcaggctgggtgttggcactgggatcagtaatggggaagtggtggactggatggactcgactggggaagaagtgagcctgtggcagaagatgcgacagtacccagggtcttgggcagaagggactctgcagctccgttcctcaatggccaagcagaagctgggtttatgagtccctgtcctcttctgcaggtccagccctggcgagggcaggtcagaggaagtgaagaaatcaagagcaaagatttataatttaatgtgtatgtgtgtatgtgtgtatgtgtgtgtgtgtgtgtgtgtgtgtatgtgtacaaacatgtattttctgcaaatctcattatgctggctagagtgatgcagacttgttcttctttttaaagcagtctcaagaataagcatttctttaaaatgtttctgtgtataatctagtttattttcagagtccattttttcttatgtctttataaggttcacttaacttaaaaacagcttttaaaacaactttttatcttctgtcttgctatcattgttcctacttccctaggaagccctggctacctttcgcattaggaccagtctgggttttaaggctctgggaagcagggttggttagtaaagacaggaatgttggggagaggtgagtagttccttcctctttctcctctccaatttatgcttttaacttattttctacctggataaacttctggaacttggcttttaaatttaacttttctagtttttaagcagtttccaccttgctttggtctaatgcttttctttgaaatgctaacagaattcccaagctttttccagttctagatatctttactagacctttgggggactcttataatggagctgcttttgaaaagcactttaattagataatgtattttgactaaatcacgaggatgcccagtgagagcttctagctgatctcagaggaccagagtgactgagggtaaagtgtctcacagcccatgctgaattttctgcattttaaactgatactgcagtcattggagagagagctcctcatttctcgaatgaaagatgagatatattcatcctcatgtaccacatctgtcttagtgtttgcgtctggggtgtgttatcaaacagagcatggtctacatcccactgtgtcaaccagaagagccaagtgttatctcaattggcccagtgtttctccaggctggggactgttaagggctctaagggaatgtagacagagtctccctgttattctgacttcctgcttgatgagctttcagttcctgtttttgctattgtttcctaaatttgacctacatattacatgggtgtagtgtgttgaggcttttcaaagaagggtctagtgagctaagtttcatcttctggtactcattgatcaaactgacctttctattctcataagcgtttctacccaaagttgtgtgtggaaggagtgtatagcagagaggaaatccctttcaacagagtcagctgctaactgatttcctataagcacactggattaagggcagccacagtggtttctactgtatgtatgaaccgaatggaggaatgttttcaaagattgatttggtgtggattgcaattgtaatggaaggcataacttgggatcccgggctgtaacttgctcttttgtttcccacccccctgacatgtatgtgtgctttaataaagctttctcacttgtcaaaaaaaaaaaaaaaaaaaaaaaaaaaaaa

SEQ ID NO: 910 - protein, 671 aa, Homo Sapiens
MSELLDLSFLSEEEKDLILSVLQRDEEVRKADEKRIRRLKNELLEIKRKGAKRGSQHYSDRTCARCQESLGRLSPKTNTCRGCNHLVCRDCRIQESNGTWRCKVCAKEIELKKATGDWFYDQKVNRFAYRTGSEIIRMSLRHKPAVSKRETVGQSLLHQTQMGDIWPGRKIIQERQKEPSVLFEVPKLKSGKSALEAESESLDSFTADSDSTSRRDSLDKSGLFPEWKKMSAPKSQVEKETQPGGQNVVFVDEGEMIFKKNTRKILRPSEYTKSVIDLRPEDVVHESGSLGDRSKSVPGLNVDMEEEEEEEDIDHLVKLHRQKLARSSMQSGSSMSTIGSMMSIYSEAGDFGNIFVTGRIAFSLKYEQQTQSLVVHVKECHQLAYADEAKKRSNPYVKTYLLPDKSRQGKRKTSIKRDTINPLYDETLRYEIPESLLAQRTLQFSVWHHGRFGRNTFLGEAEIQMDSWKLDKKLDHCLPLHGKISAESPTGLPSHKGELVVSLKYIPASKTPVGGDRKKSKGGEGGELQVWIKEAKNLTAAKAGGTSDSFVKGYLLPMRNKASKRKTPVMKKTLNPHYNHTFVYNGVRLEDLQHMCLELTVWDREPLASNDFLGGVRLGVGTGISNGEVVDWMDSTGEEVSLWQKMRQYPGSWAEGTLQLRSSMAKQKLGL

SEQ ID NO: 911 - RNA, 49 nt, Homo Sapiens
ccaggagaaaacgccagcgcacgacagaaggaagaaaagggcgaggaga

SEQ ID NO: 912 - DNA, 4109 bp, Homo Sapiens; identical to SEQ ID NO: 818

SEQ ID NO: 913 - protein, 640 aa, Homo Sapiens; identical to SEQ ID NO: 819

SEQ ID NO: 914 - DNA, 1674 bp, Homo Sapiens
ggcctttgtctctcgtgcccgcacgtgcgtgtctcggtcagtagccctgcgcttctccttcactctcggcggttcaggaggctctgccgcagccggggccctcctgtgacctgcatgtactgggggattcgcagggaggatgtcgggacaccccggaagctgggaaatgaactcggttgcctttgaggatgtggctgtgaacttcacccaggaggagtgggctttgttggatccttcccagaagaatctctatagagacgtgatgcaggaaaccttcaggaatctggcttccataggaaacaaaggggaagaccagagcattgaagatcagtacaaaaattcttcaagaaatctaagttcatttcagatacatcagagaaatcacactggagagaaaccctatgaatgtatggaatgtgggaaagccttaggtttttcccgttctcttaatagacataaaaggattcacactggagaaaaacgctatgaatgtaagcaatgtgggaaagccttcagtcgttccagtcaccttcgtgaccatgaaagaactcatactggagagaaaccctatgaatgtaagcactgtgggaaagccttccgttactccaattgccttcattaccatgaaagaactcacactggagagaaaccttatgtgtgcatggaatgtggcaaagctttcagttgtctcagttccttgcaaggacatataaaggctcatgctggtgaagaaccctatccatgtaagcaatgtgggaaagccttcagatacgccagttcccttcagaaacacgagaaaactcatattgcacagaaaccctatgtatgtaacaattgtggtaaaggcttcagatgttccagttcccttcgtgaccatgaaaggactcatactggagagaaaccctatgaatgtcagaaatgtggcaaagcctttagtcgtgctagtaccctttggaagcataaaaaaactcatactggagaaaagccctataaatgtaaaaaaatgtaaaggctttaatcactacagtttttgtcaaaaacatgaacagtcacatacttgagagaaactgtgaatgtaaggtgtaggaaagtacttaattttcccagatttcctcaaatacatgaaacgaatcaaactggagataaaccctatgactataagcaataaggtaaagcattcaatttttccatttctttttgaaaacttgaaaggactcactgaagaaaatccatatgaatgtttaaaatgtggtaaggcctgcagttgttccagtggtatttgatggtataacataactcattctagagaaaaactttatgaaggtatcgaatgtgagaatgccttcatttatcctataactcactcagagacacatggtaacacatactccagattgaccttataaataaaagaatgcccaccagattgaaatcctagaaatacagaaaattctgaattttaacaattactttaaaggtcatgtgaaaactcccactggaaataaatcctgtaaatgtaaatattatggaaaaccttatggaaaataattatagtacaattctcaagaaaattcactatgtgaatgagatgttttaggagctataaataaattgaatatattggttgctcatttttgaagagagtctctagaatatagattttcacttcttttg

SEQ ID NO: 915 - protein, 289 aa, Homo Sapiens
MSGHPGSWEMNSVAFEDVAVNFTQEEWALLDPSQKNLYRDVMQETFRNLASIGNKGEDQSIEDQYKNSSRNLSSFQIHQRNHTGEKPYECMECGKALGFSRSLNRHKRIHTGEKRYECKQCGKAFSRSSHLRDHERTHTGEKPYECKHCGKAFRYSNCLHYHERTHTGEKPYVCMECGKAFSCLSSLQGHIKAHAGEEPYPCKQCGKAFRYASSLQKHEKTHIAQKPYVCNNCGKGFRCSSSLRDHERTHTGEKPYECQKCGKAFSRASTLWKHKKTHTGEKPYKCKKM

SEQ ID NO: 916 - DNA, 1619 bp, Homo Sapiens
ggctcatttgcagacatatgggtgattggtacagtaggtttataaacagaagtttaaacttgtaagcttaagcttccgtttataaacagaagtttaaaattataggtcctgtttaacattcagctctgttaactcactcatctttttgtgtttttacactttgtcaagatttctttacatattcatcaatgtctgaagaagttacttatgcagatcttcaattccagaactccagtgagatggaaaaaatcccagaaattggcaaatttggggaaaaagcacctccagctccctctcatgtatggcgtccagcagccttgtttctgactcttctgtgccttctgttgctcattggattgggagtcttggcaagcatgtttcacgtaactttgaagatagaaatgaaaaaaatgaacaaactacaaaacatcagtgaagagctccagagaaatatttctctacaactgatgagtaacatgaatatctccaacaagatcaggaacctctccaccacactgcaaacaatagccaccaaattatgtcgtgagctatatagcaaagaacaagagcacaaatgtaagccttgtccaaggagatggatttggcataaggacagctgttatttcctaagtgatgatgtccaaacatggcaggagagtaaaatggcctgtgctgctcagaatgccagcctgttgaagataaacaacaaaaatgcattggaatttataaaatcccagagtagatcatatgactattggctgggattatctcctgaagaagattccactcgtggtatgagagtggataatataatcaactcctctgcctgggttataagaaacgcacctgacttaaataacatgtattgtggatatataaatagactatatgttcaatattatcactgcacttataaaaaaagaatgatatgtgagaagatggccaatccagtgcagcttggttctacatattttagggaggcatgaggcatcaatcaaatacatttaaggagtgtagggggtgggggttctaggctataggtaaatttaaatattttctggttgacaattagttgagtttgtctgaagacctgggattttatcatgcagatgaaacatccaggtagcaagcttcagagagaatagactgtgaatgttaatgccagagaggtataatgaagcatgtcccacctcccactttccatcatggcctgaaccctggaggaagaggaagtccattcagatagttgtggggggccttcgaattttcattttcatttacgttcttccccttctggccaagatttgccagaggcaacatcaaaaaccagcaaattttaattttgtcccacagcgttgctagggtggcatggctccccatctcgggtccatcctatacttccatgggactccctatggctgaaggccttatgagtcaaaggacttatagccaattgattgttctaggccaggtaagaatggatatggacatgcatttattacctcttaaaattattattttaagtaaaagccaataaacaaaaacgaaaaggcaaaaaaaaaaaaaaaaaaaaaaaaaaaaaaaaaaaaaaaaaaaaaaaaaaaaaaaaaaaaaaaaaa

SEQ ID NO: 917 - protein, 265 aa, Homo Sapiens
MSEEVTYADLQFQNSSEMEKIPEIGKFGEKAPPAPSHVWRPAALFLTLLCLLLLIGLGVLASMFHVTLKIEMKKMNKLQNISEELQRNISLQLMSNMNISNKIRNLSTTLQTIATKLCRELYSKEQEHKCKPCPRRWIWHKDSCYFLSDDVQTWQESKMACAAQNASLLKINNKNALEFIKSQSRSYDYWLGLSPEEDSTRGMRVDNIINSSAWVIRNAPDLNNMYCGYINRLYVQYYHCTYKKRMICEKMANPVQLGSTYFREA

SEQ ID NO: 918 - DNA, 11241 bp, Homo Sapiens
tccgcccggatagccggcggcggcggcggcggcggcggcggcggcggccgggagaggcccctccttcacgccctgcttctctccctcgctcgcagtcgagccgagccggcggacccgcctgggctccgaccctgcccaggccatggccggcaacgtgaagaagagctctggggccgggggcggcagcggctccgggggctcgggttcgggtggcctgattgggctcatgaaggacgccttccagccgcaccaccaccaccaccaccacctcagcccccacccgccggggacggtggacaagaagatggtggagaagtgctggaagctcatggacaaggtggtgcggttgtgtcagaacccaaagctggcgctaaagaatagcccaccttatatcttagacctgctaccagatacctaccagcatctccgtactatcttgtcaagatatgaggggaagatggagacacttggagaaaatgagtattttagggtgtttatggagaatttgatgaagaaaactaagcaaaccataagcctcttcaaggagggaaaagaaagaatgtatgaggagaattctcagcctaggcgaaacctaaccaaactgtccctcatcttcagccacatgctggcagaactaaaaggaatctttccaagtggactctttcagggagacacatttcggattactaaagcagatgctgcggaattttggagaaaagcttttggggaaaagacaatagtcccttggaagagctttcgacaggctctacatgaagtgcatcccatcagttctgggctggaggccatggctctgaaatccactattgatctgacctgcaatgattatatttcggtttttgaatttgacatctttacccgactctttcagccctggtcctctttgctcaggaattggaacagccttgctgtaactcatcctggctacatggcttttttgacgtatgacgaagtgaaagctcggctccagaaattcattcacaaacctggcagttatatcttccggctgagctgtactcgtctgggtcagtgggctattgggtatgttactgctgatgggaacattctccagacaatccctcacaataaacctctcttccaagcactgattgatggcttcagggaaggcttctatttgtttcctgatggacgaaatcagaatcctgatctgactggcttatgtgaaccaactccccaagaccatatcaaagtgacccaggaacaatatgaattatactgtgagatgggctccacattccaactatgtaaaatatgtgctgaaaatgataaggatgtaaagattgagccctgtggacacctcatgtgcacatcctgtcttacatcctggcaggaatcagaaggtcagggctgtcctttctgccgatgtgaaattaaaggtactgaacccatcgtggtagatccgtttgatcctagagggagtggcagcctgttgaggcaaggagcagagggagctccctccccaaattatgatgatgatgatgatgaacgagctgatgatactctcttcatgatgaaggaattggctggtgccaaggtggaacggccgccttctccattctccatggccccacaagcttcccttcccccggtgccaccacgacttgaccttctgccgcagcgagtatgtgttccctcaagtgcttctgctcttggaactgcttctaaggctgcttctggctcccttcataaagacaaaccattgccagtacctcccacacttcgagatcttccaccaccaccgcctccagaccggccatattctgttggagcagaatcccgacctcaaagacgccccttgccttgtacaccaggcgactgtccctccagagacaaactgccccctgtcccctctagccgccttggagactcatggctgccccggccaatccccaaagtaccagtatctgccccaagttccagtgatccctggacaggaagagaattaaccaaccggcactcacttccattttcattgccctcacaaatggagcccagaccagatgtgcctaggctcggaagcacgttcagtctggatacctccatgagtatgaatagcagcccattagtaggtccagagtgtgaccaccccaaaatcaaaccttcctcatctgccaatgccatttattctctggctgccagacctcttcctgtgccaaaactgccacctggggagcaatgtgagggtgaagaggacacagagtacatgactccctcttccaggcctctacggcctttggatacatcccagagttcacgagcatgtgattgcgaccagcagattgatagctgtacgtatgaagcaatgtataatattcagtcccaggcgccatctatcaccgagagcagcacctttggtgaagggaatttggccgcagcccatgccaacactggtcccgaggagtcagaaaatgaggatgatgggtatgatgtcccaaagccacctgtgccggccgtgctggcccgccgaactctctcagatatctctaatgccagctcctcctttggctggttgtctctggatggtgatcctacaacaaatgtcactgaaggttcccaagttcccgagaggcctccaaaaccattcccgcggagaatcaactctgaacggaaagctggcagctgtcagcaaggtagtggtcctgccgcctctgctgccaccgcctcacctcagctctccagtgagatcgagaacctcatgagtcaggggtactcctaccaggacatccagaaagctttggtcattgcccagaacaacatcgagatggccaaaaacatcctccgggaatttgtttccatttcttctcctgcccatgtagctacctagcacaccatctccctgctgcaggtttagaggaccagtgagttgggagttattactcaagtggcacctagaagggcaggagttcctttggtgacttcacagtgaagtcttgccctctctgtgggatatcacatcagtggttccaagatttcaaagtggtgaaatgaaaatggagcagctagtatgttttattattttatgggtcttgagtgcatttgaaggtgtccttcagttcccacgtagagagagtgtggattatattacatgataacctacctggggaacagtccagaaagctatagaacaagtattttgctggaaatcctaattgaggacttaagacttcctgggttaaggatgtggccgtgtgtgtgtgtgtctgcctgtggttgtatgtgtccttgtgattataagattaacctgctgtgtgtgttaattccaggcagggaattagcacaaaaggtttaggaaggaatctttttttaaagacttccatctactgtggtattatacccaagcctagtgtgtattacaacttcaacactcccctttggcttatattaccatgtgcatagctaaagtcttctatttttagaacaccttctgtctgttctttccccatcaactccttcctcatccttcttggtgttctgtcatgggccatgggcttgctatggccagccttactgaggccaagcagcttatgggatgttctttattgtgtgtgatggtattggtttgtttggtagataagtgggaggaaaagtactgttgctacactattataggcatgtttgatactagcagctaacactggtcactccaaagcactgtttctataggaacattgaagctattaagatgttttgattatcctaattacataatgaccgatttgagatagaggcctttaaatacattccatgccctccccagaaaatagtctgtgggagtcagttgccttggtgccaggtatgtgttctgatgtaggtcatgagtctttctacttaatgggaagggaagaacatttgtttccaggatgactttctggccagaataccggaaagcttttaggaagcttcgttcacatgctatttaaatgcacaaaatagacagtaaggatttatctgttcagtttttcttcccagtgaattaatttcagcttatatgggtgtcttcatttgaacatgaggaatattaggttatattttcagcagtggttttttcctttgccctttaaggagtggggataatgtccacggtggcccagcctcttgctgatggcaccttccctgcattgctgcctcccgatgatgtggttcttttcttgtgcctgtggctttgggaatgtaacatctctttcctcctttccttcccttttcctcttcacctgaggtcctaaatactctctgtaattactgtgttcttcacggtaattagacatcattcagtgaataaattactgtagtcaaagacagtatgggctggcagtttgtgtaattgcaagttcataaagagaattgagggtccagttgggagaactattagtcagttcttttatatgctgataaatgatccctcgagttcagttagtattctgtccagagtgtttagctcactttcttagcagtgtgtaagctttctccatgtcagaagcaagcctgctctttgataaatctgtcttcctgaaaatctaaatcatgcttttgtctttagatctacacagaaatgaccctccttggatcagttttctttccagtctaatcatctttggaactaaaacttgttctaactcgtctcttggcattcagctactcctagatcttttggttttatcccctggcctcagagccatttatattcccagagtaggcagtacaggatctcgtgttgatttgctgtggttacccagtgtcttctctacatggcataaagcggcaaagcccaccattaggtgaggcggtcccgagttgaggtagagtggggcagaggaagatggcagtgaatatcaaacagtagaccgccatcaacttctaacagccagtacacacactgtttcattttgaggtaacgttcagttttgcattttgtttaaatattgaaggcctagacaaagaactagaaaaaaaaaagcagtttccaggcccatccatattgtaatttttctttatctgcagatattgcctgtagtctaaagatctctttggaagacaaagcattggctatatatcttttgccttttccatgcatctaaatcttctctggagattatctccctactgtgtaggttaagggcagtctcgacttttccttttttgagtcctgtgtggctctttgaatcagcgtgaaactgaggctccagctccctgtgttgtgtgtgtgtgccatccatgggcttgggtgtcagtttgtcacaggtatctgccagcattcaaggttttggatcatttcatgaggatctttcctttgactgggtgctgtgaggacacacctgggtctgtgcctgagattgccaggcaagattaaggaaagttttcatgtggcttttgttttgaggttattctcaaaaccttaatttcttatattttctgttgactaaggcaccagtaacccattcttcaccctccatttgtatggcaatttaaaagtctttggctttgctctgaatttaattaaaactgccttttatgaacagacttcgagttttgccattttgggcaagcccttccgcttgtcccttcctagtggctaataaagtaaaaaaacccacactactttgttctctttttctcatattcattgggctgttgtattcagccagtctcatgctttccctgggtcttcacggattgctttccaagctgccttgttgcggggttgctgcagagcagcaactggacctttccagctgtcgccatgttccttccactaaagtagagggttcttaaaatggaaaaacctgtgggctcttcatatacctccctttagttaagtaatagaccaggcagcttctcatctcagcatttacctgttaatatttttgtgaatagtgctctctacctgtgggtggccgttctcttccacttgctcgtctccccccagccccattctgcataatctaccattcttctcctctctttctcttcttatacagaccctcattactggggcccaagatgtgggatactactgttagtattatttaactattttgtagatttaaaagatttctggttaagggaggtgggggtcactgttcatcactcttaaaatatgtgttttctctatagaaaagtaaaatgtgtttatggtcccaaacagtcaactcacaaatttttataacaaaatttccttgtaaaaactagggaccatctatatattccctttaagatctagttctttttgtaggtgttcagcaatggtgataaagcagaatattctcctacctcacgtcattaaagtcagaagattatagaccttctcaaactataagtccctcttcttgccgttggcctttctgactctggaatgaccactgttcattgaaaaatagttttctgactattggtctggctctaacagtttgtttgttcatccagcaaatgtttatgagtgatgaccatgtgccagaaatgtcaggtatgtgtccttcccttggcgccacatagtagtttactaatgtttgggggattgtacttggactgtcatagcctctgcgtttgaccttaaaatagctcttcccagtaagattgtgcaatttttattcacagctcttccatgtagacttacctttcctcatagagctatcctggttaataacaggccaagattctcccattatcccctgttgtctcctgtagctttgataatgcctgggagattccttggtgtaagtgtcatggataccgactgtttttatgttggaatttgttccaacataattagaatctgtttggtgagttgaaaggtaagttggctcagagttgcacagtagggcattaaatgtttaagcaaagcatctgcccacactcccctttccaatctagtgccttccttgaactttttcctgagctgctacgtccctaatcccccttgttgggaggattttcgtatcacccttatgggacctgtcaccatgtcctgtactatttggaattggttttccagtctttcaacaaccgttgtggctaactatgttttagaagggctggaggtgtgggccctgtcttcgggtctcaggacccaaagatcctttagtcagttgttgggtcttccaagagccagacattaatacagattgaactccatcagtcccctaattgtcagcctttacctccctcccagagcaaggagtttagggattctaaagcttagtgtccacacatcattctaccagaccttagagctttagaagctcaatctaaaatactgtaactcagcataaactattactatcactcctttgaactcagtctccatgagcagtgttttgttggaaatacatagaacggcttaatgcctagagggtggtggatagtgaaggacggtcaaggttatatttttgactgcttagggattctttggatccaagaaacagaaatgttcaagcggaataaaggagggagtggagttgtggtaaggatgcagggtatttcgcagaacccaggacgggaagtgcctttggttcttgggtggagctggaactgcagagctttgcacctagtcctttctcccgcttcacagtctgcttatggtatatgtggcccccaaataggcactctagtcctcaagtctacaccaccttccaactctggggatcaccatgaacaaattctcaatttcccatacttaattttttttttttttgagatggagtctcgctgtgtcgcccaggctggagtgcagtggtgcagtctcaactcaccacaacctctgcctcccaggttcaagcagttctctgcctcaacctcccgagtagctgggattacaggcgcctgccaccatgcccagctaatgttcatatttttagtagagacagggtttcaccgtcttggctaggctggtcttgaactcctgaccctcatgatccacccacctcggcctcccaaagtgctaagattacaggcgtgagccaccgcgcccggcccatacttcgtattcttaaaaaaaactacactcagcccagcacattgatcaagtatctatctctgagcagttggccttgccagggagagcagagatgtggcaggctccttcagctggagacagggagcttctcagagaagtgagcagagactccacagacaccctaaaaaggcttctactcaagaagtaaagccactactcctgcctttttgcttagtggacaggaaggcacaggagtttgtctgggacatcatagaaattcttaggtttaacttaattctggtcattgtcttctttatttcctgtttttcttccctttgtcagtcttcgcatccaagatttcttccctccctcttgtgggccagcctgtcctgttccagagctagcctgttcctgggtagccttccttagcctccattcagcctcaggtcttttgccttcttccgtgtttatttagagagcagaatctaataacgggttccactgtagccactatccatggacttctgggtcctcttcaggtttgagtgcttgaaaatgttcattctctgggcttgtggcctgtctcctccactctcctcctcaccctctcgctccttcctgtgtgagggccgctctgcagtaatgttctcaggcaagccttcctaggcacctcagaaactactttgccagagccagtaagaatatataatattggagcagttgccaggatagaaattaaatatagattccagtttaggatagagtttttaccgagagctctttagacagtatacctgtgtcttctctggcaattgctttcattttagtcctatataaaagctttccttttctgtttttttttaaaactatgcttttgcttgcctaaatcttttgatcttatatttctctcatctcagagcctgtcctgagttgtaaggtatttcatactgccttacttaaaagttttttaaactactagagtcatttgatacacacagaagttacctaataatccaaagatgtccatcaagggaggaagggtgggtcatcagactttgcctttgatgttgtagactaggctcctgagttaagcagcagagggacagcagtgccatgtgccttcactgtgtcccaggaaatctgggttggttccagtgggaaataccagtatttcttggttctggaaagtagcaaaagagtaggagatggggaaatagggatggggagagcaagccccgcatgtccatggcgagtcaggtggggagcacgggtggaagggccggctgttgacagacagactaagctgtgtggtgctcttgccgccccttcctgggtacagagcttgagaaaaatgcagccgaccactccctgtgtttgtacagagcaaagcccaaaagccaacctcagatctcctgatttggcagctgaagaaatcagcagagtcctgattgcctgattcagtcccaaaaatgaatgtcaggccccgccccctccccaccaacattgcctctcctacattctccttctgcccctaaatcagacaggaggccagagaggagtattgctcaatgcgtgctatgtgcaactcctcaggccttgtgccacctccatgctgagccctgaagcagggtgtcctgggtgcctgtgtgtcagctccctcctctctacctacctctgaccttcttgtgggtgagggtggccatgcttatggccatcttaaaactggagaggcagagaactacttatgagtctgtagaccacgtgttgtcttccatggcctgtttctcctgctgtctgggtgagtgagcctgcaacgcaatgcccatgagagtaaatgcctcctgacctaccctgctcagcactgttctagtgtcttggccttgaaagaaaagcctgacttcctgctgacacatgtggtaggggcatggcagctatgaggcacctcctacgtctgttttctggctgtggtgacttgggatttttaaccttatatatctttttcctttactcaaaacaaaacaatttttagcacactgaaaaaaaaaaaaagccaaatgttttgtgcctttctaaggcagcactgtatcccaggctgcattttaggacttaatatggaaataccagagtctgagctcctctaccttgagtttcattagtccttagtgtctaggagacaggaaagaatgctctctgtgactggagaggtgacatgcaggtgcagtgtgtctggagtccctttcccctgctgtgagacttcagtggaggagagaagcattgtaccctgggatcatttggttggttccaatcacaagcttagttatcaggttgcatgccttgtctcctgcaaaagacagaatgtttcacaattcccaggtaaactctggaccattccaagtgtcctagccttctgatgacattaattacctagttgtgtcgaggagtataggatggactctcctgagaaggggaggttggtggctttgtcttttctttttgctggatcctgaactggtctagacctcctgcccccaccccccagcccccatcagatgtggctggcctttcatttgaaggcttcagacttaaagcattaagcagctagtgccctctgcagggcctggtttccccagggaagggcagcaaggaacatgggaccagaagcctgtcctcagtaatgtgactatagtgagctttagcaaaagtttttctatataatgacatcttacttatcttttaccctttcctcagttttcccctgcctttaactaataaagaattgggagacagaaattttaaagtcctccttattcaagattttgaaattcttagcctgggagtgctggagagaacctgatgctttctccagaatgaagagtcccaatttgtatatcagtgttaagaagaaaacaaaacaaacacataggtgagattttcgtggactattttaaaaatgtgtcattaatataaaaaatttatattagcagtatttaatcattctcacctgtaaagaataagaaaaacagaaggtaaatattcttacagagaatagcagagctttaagattcattttcattttaagtccattttattttgccagtgtattaatgtttagaagtctgttttactaatgttatttattaattttttttcatttccatacacagttagttaactaaagagctttttcaagcacccatgtctgtaaaaaaatatttttaaataaagtttcttttgttgtagcagaaaaaaaaaaa

SEQ ID NO: 919 - protein, 906 aa, Homo Sapiens
MAGNVKKSSGAGGGSGSGGSGSGGLIGLMKDAFQPHHHHHHHLSPHPPGTVDKKMVEKCWKLMDKVVRLCQNPKLALKNSPPYILDLLPDTYQHLRTILSRYEGKMETLGENEYFRVFMENLMKKTKQTISLFKEGKERMYEENSQPRRNLTKLSLIFSHMLAELKGIFPSGLFQGDTFRITKADAAEFWRKAFGEKTIVPWKSFRQALHEVHPISSGLEAMALKSTIDLTCNDYISVFEFDIFTRLFQPWSSLLRNWNSLAVTHPGYMAFLTYDEVKARLQKFIHKPGSYIFRLSCTRLGQWAIGYVTADGNILQTIPHNKPLFQALIDGFREGFYLFPDGRNQNPDLTGLCEPTPQDHIKVTQEQYELYCEMGSTFQLCKICAENDKDVKIEPCGHLMCTSCLTSWQESEGQGCPFCRCEIKGTEPIVVDPFDPRGSGSLLRQGAEGAPSPNYDDDDDERADDTLFMMKELAGAKVERPPSPFSMAPQASLPPVPPRLDLLPQRVCVPSSASALGTASKAASGSLHKDKPLPVPPTLRDLPPPPPPDRPYSVGAESRPQRRPLPCTPGDCPSRDKLPPVPSSRLGDSWLPRPIPKVPVSAPSSSDPWTGRELTNRHSLPFSLPSQMEPRPDVPRLGSTFSLDTSMSMNSSPLVGPECDHPKIKPSSSANAIYSLAARPLPVPKLPPGEQCEGEEDTEYMTPSSRPLRPLDTSQSSRACDCDQQIDSCTYEAMYNIQSQAPSITESSTFGEGNLAAAHANTGPEESENEDDGYDVPKPPVPAVLARRTLSDISNASSSFGWLSLDGDPTTNVTEGSQVPERPPKPFPRRINSERKAGSCQQGSGPAASAATASPQLSSEIENLMSQGYSYQDIQKALVIAQNNIEMAKNILREFVSISSPAHVAT

SEQ ID NO: 920 - DNA, 3558 bp, Homo Sapiens
cagaccccagttcgccgactaagcagaagaaagatcaaaaaccggaaaagaggagaagagcaaacaggcactttgaggaacaatcccctttaactccaagccgacagcggtctaggaattcaagttcagtgcctaccgaagacaaaggcgccccgagggagtggcggtgcgaccccagggcgtgggcccggccgcggagcccacactgcccggctgacccggtggtctcggaccatgtctcccgccccaagacccccccgttgtctcctgctccccctgctcacgctcggcaccgcgctcgcctccctcggctcggcccaaagcagcagcttcagccccgaagcctggctacagcaatatggctacctgcctcccggggacctacgtacccacacacagcgctcaccccagtcactctcagcggccatcgctgccatgcagaagttttacggcttgcaagtaacaggcaaagctgatgcagacaccatgaaggccatgaggcgcccccgatgtggtgttccagacaagtttggggctgagatcaaggccaatgttcgaaggaagcgctacgccatccagggtctcaaatggcaacataatgaaatcactttctgcatccagaattacacccccaaggtgggcgagtatgccacatacgaggccattcgcaaggcgttccgcgtgtgggagagtgccacaccactgcgcttccgcgaggtgccctatgcctacatccgtgagggccatgagaagcaggccgacatcatgatcttctttgccgagggcttccatggcgacagcacgcccttcgatggtgagggcggcttcctggcccatgcctacttcccaggccccaacattggaggagacacccactttgactctgccgagccttggactgtcaggaatgaggatctgaatggaaatgacatcttcctggtggctgtgcacgagctgggccatgccctggggctcgagcattccagtgacccctcggccatcatggcacccttttaccagtggatggacacggagaattttgtgctgcccgatgatgaccgccggggcatccagcaactttatgggggtgagtcagggttccccaccaagatgccccctcaacccaggactacctcccggccttctgttcctgataaacccaaaaaccccacctatgggcccaacatctgtgacgggaactttgacaccgtggccatgctccgaggggagatgtttgtcttcaaggagcgctggttctggcgggtgaggaataaccaagtgatggatggatacccaatgcccattggccagttctggcggggcctgcctgcgtccatcaacactgcctacgagaggaaggatggcaaattcgtcttcttcaaaggagacaagcattgggtgtttgatgaggcgtccctggaacctggctaccccaagcacattaaggagctgggccgagggctgcctaccgacaagattgatgctgctctcttctggatgcccaatggaaagacctacttcttccgtggaaacaagtactaccgtttcaacgaagagctcagggcagtggatagcgagtaccccaagaacatcaaagtctgggaagggatccctgagtctcccagagggtcattcatgggcagcgatgaagtcttcacttacttctacaaggggaacaaatactggaaattcaacaaccagaagctgaaggtagaaccgggctaccccaagtcagccctgagggactggatgggctgcccatcgggaggccggccggatgaggggactgaggaggagacggaggtgatcatcattgaggtggacgaggagggcggcggggcggtgagcgcggctgccgtggtgctgcccgtgctgctgctgctcctggtgctggcggtgggccttgcagtcttcttcttcagacgccatgggacccccaggcgactgctctactgccagcgttccctgctggacaaggtctgacgcccaccgccggcccgcccactcctaccacaaggactttgcctctgaaggccagtggcagcaggtggtggtgggtgggctgctcccatcgtcccgagccccctccccgcagcctccttgcttctctctgtcccctggctggcctccttcaccctgaccgcctccctccctcctgccccggcattgcatcttccctagataggtcccctgagggctgagtgggagggcggccctttccagcctctgcccctcaggggaaccctgtagctttgtgtctgtccagccccatctgaatgtgttgggggctctgcacttgaaggcaggaccctcagacctcgctggtaaaggtcaaatggggtcatctgctccttttccatcccctgacataccttaacctctgaactctgacctcaggaggctctgggcactccagccctgaaagccccaggtgtacccaattggcagcctctcactactctttctggctaaaaggaatctaatcttgttgagggtagagaccctgagacagtgtgagggggtggggactgccaagccaccctaagaccttgggaggaaaactcagagagggtcttcgttgctcagtcagtcaagttcctcggagatctgcctctgcctcacctaccccagggaacttccaaggaaggagcctgagccactggggactaagtgggcagaagaaacccttggcagccctgtgcctctcgaatgttagccttggatggggctttcacagttagaagagctgaaaccaggggtgcagctgtcaggtagggtggggccggtgggagaggcccgggtcagagccctgggggtgagcctgaaggccacagagaaagaaccttgcccaaactcaggcagctggggctgaggcccaaaggcagaacagccagagggggcaggaggggaccaaaaaggaaaatgaggacgtgcagcagcattggaaggctggggccgggcaggccaggccaagccaagcagggggccacagggtgggctgtggagctctcaggaagggccctgaggaaggcacacttgctcctgttggtccctgtccttgctgcccaggcagcgtggaggggaagggtagggcagccagagaaaggagcagagaaggcacacaaacgaggaatgaggggcttcacgagaggccacagggcctggctggccacgctgtcccggcctgctcaccatctcagtgaggggcaggagctggggctcgcttaggctgggtccacgcttccctggtgccagcacccctcaagcctgtctcaccagtggcctgccctctcgctcccccacccagcccacccattgaagtctccttgggccaccaaaggtggtggccatggtaccggggacttgggagagtgagacccagtggagggagcaagaggagagggatgtcgggggggtggggcacggggtaggggaaatggggtgaacggtgctggcagttcggctagatttctgtcttgtttgtttttttgttttgtttaatgtatatttttattataattattatatatgaattccaaaaaaaaaaaaaaaaaaaaa

SEQ ID NO: 921 - protein, 582 aa, Homo Sapiens
MSPAPRPPRCLLLPLLTLGTALASLGSAQSSSFSPEAWLQQYGYLPPGDLRTHTQRSPQSLSAAIAAMQKFYGLQVTGKADADTMKAMRRPRCGVPDKFGAEIKANVRRKRYAIQGLKWQHNEITFCIQNYTPKVGEYATYEAIRKAFRVWESATPLRFREVPYAYIREGHEKQADIMIFFAEGFHGDSTPFDGEGGFLAHAYFPGPNIGGDTHFDSAEPWTVRNEDLNGNDIFLVAVHELGHALGLEHSSDPSAIMAPFYQWMDTENFVLPDDDRRGIQQLYGGESGFPTKMPPQPRTTSRPSVPDKPKNPTYGPNICDGNFDTVAMLRGEMFVFKERWFWRVRNNQVMDGYPMPIGQFWRGLPASINTAYERKDGKFVFFKGDKHWVFDEASLEPGYPKHIKELGRGLPTDKIDAALFWMPNGKTYFFRGNKYYRFNEELRAVDSEYPKNIKVWEGIPESPRGSFMGSDEVFTYFYKGNKYWKFNNQKLKVEPGYPKSALRDWMGCPSGGRPDEGTEEETEVIIIEVDEEGGGAVSAAAVVLPVLLLLLVLAVGLAVFFFRRHGTPRRLLYCQRSLLDKV

SEQ ID NO: 922 - DNA, 816 bp, Homo Sapiens
cgcggccgctcctgcgggcggaagcctcctggcgctcggccctgcgcccctccccccggcgcgcggccccgcccaggacgaggggcggtgggcaggcagcgctgggtccagtggtcgggggaaggcgaggattaccctcccggaggcgttgtctgcgactcggcggaggctccaacttccagtggcccggtcgggaaagatcagagcctcctaagaaatatccagaagtcaagccatggatccacctgcacgtaaagaaaaaaccaaagttaaagaatctgtcagcagagttgagaaggccaaacagaaatcagcccagcaggagctgaagcagagacaaagagcagagatctatgccctcaacagagtcatgacagaactggagcagcagcagtttgatgagttctgtaaacagatgcagcctcctggagaatgaggccccaggttcaaaccagatgggatcctgagagctttgagagggtgttgccagttttaagctgagatggcccatttggagccttacagaactagaccagaagacatttgtggataaatctgaactcacttcctgtgtgtaacttctaacttcactggttcctcccatctgaattggccacatgcttgctgaagagacttgttttcttcttctaagacagtggttttgttttttgggtttttttaaaaaaaaaaaaaaaacacacacaaaaaacactttttctattgtttgagaaaaatcagtgtttctcatgaaactctatatcttctccaaaaatacaaataaaatactaataaaatgttaaaaaaaaaaaaaaaaaa

SEQ ID NO: 923 - protein, 66 aa, Homo Sapiens
MDPPARKEKTKVKESVSRVEKAKQKSAQQELKQRQRAEIYALNRVMTELEQQQFDEFCKQMQPPGE

SEQ ID NO: 924 - DNA, 6087 bp, Homo Sapiens
atgccgggggccggagcccgggcggaggagggcggcggcggcggcgagggcgcggcgcagggggcggccgcggagcccggggcgggtccggcgcgggagccagcgcggctgtgtggctatctgcagaagctgtcgggcaagggccccctgcgtggctaccgcagccgctggttcgtgttcgacgcgcgccgctgctacctttactatttcaagagtccgcaggacgcgctgcccctcggccacttggacatcgcggacgcctgcttcagctaccagggccccgacgaggcggcggagccgggcacggagccgcccgcgcacttccaggtgcacagcgcgggagccgtcacggtgctcaaggctcccaatcgtcaactcatgacttactggttacaggagcttcagcagaagagatgggaatattgtaacagtcttgacatggtcaagtgggacagcaggacctctccaactcccggggattttcctaagggtcttgtagccagagataacactgatttaatttacccacacccaaatgcttctgcagaaaaagccagaaatgtcctagctgtggagactgtgcctggagagctggtgggagaacaagctgcaaatcagcccgccccagggcatccaaattccattaatttttactctttgaaacagtggggcaatgagctcaagaattcgatgtcttctttccgtcctgggagaggacataatgatagtcggaggactgtgttttataccaatgaagagtgggaacttttagacccaacccctaaggacctagaggagtccatagtacaggaagaaaagaagaagctgacccctgaaggaaacaaaggagtaactggctcaggattcccctttgattttggacgtaacccctacaaaggaaagcgccctttgaaagacataattgggtcgtacaaaaatcgtcacagcagtggtgacccttcaagtgaaggcacatcaggcagtggcagcgtcagcatcaggaagccggcctccgaaatgcaactgcaggtccagagccagcaggaagagctggaacagttaaagaaagacctgtccagtcagaaggagcttgttcgactgctccagcagacagtccggtcatcccagtatgacaagtatttcacaagcagccggctctgtgagggggtcccaaaggacacgctcgagcttctgcaccaaaaggatgatcagattctgggccttaccagccagctggagaggttcagcttggagaaggagagtcttcagcaggaagtaaggacgctgaagagcaaagtgggcgagctcaacgagcagctgggaatgctcatggagaccatccaagccaaggacgaggtcatcatcaagctcagcgagggcgagggcaacgggcctcctcccaccgtggcgcccagctccccttcggttgtgcctgttgccagggaccagctggaactggacaggctgaaagataatctacaggggtacaaaacccaaaacaaatttctaaataaggagattttggaactctcagctctacgaagaaatgcagaaaggagagagagggatctgatggcaaagtattctagcctggaagccaagctctgccagatagaaagtaaatacctgatattgctccaagaaatgaagacaccagtgtgctcagaagaccaggggcccacccgggaggtcatagcccagttgctggaggatgctctgcaggttgagagccaagagcagccggagcaagcatttgttaaacctcatcttgtcagtgaatatgatatttatgggttcaggactgtacctgaggatgatgaggaagagaaattggttgccaaggtccgcgcgttggatctgaagactctctacctcacagaaaaccaggaagtctccactggggtcaagtgggaaaactattttgcaagtacagtgaacagggagatgatgtgctctccagagttaaaaaacctcatccgtgcgggcattccccacgagcaccgttccaaggtgtggaagtggtgtgtggaccgtcacaccaggaagttcaaggacaacactgagcctggccacttccagaccttgctgcagaaggcgctggagaaacagaacccagcctccaagcagattgagctggacttgctgcgaactctgcccaacaacaaacattactcctgccccacctcagaaggcatacagaagttacgcaatgtcctcctcgccttctcctggcggaatccagatatcggctactgtcaaggcctaaacaggttggtggcagtggccctcctgtacctggaacaagaagatgctttctggtgtctcgttaccatagtggaagttttcatgcctcgagactattatacaaagactcttttaggatcccaggtggaccagcgggtgttcagagaccttatgagtgagaagctgcctcggttgcatggccactttgaacagtacaaagtcgactacactctcatcactttcaactggtttctggtggtatttgtggatagtgtcgttagtgacatcctctttaaaatatgggactctttcctttatgaaggaccaaaggttattttccgttttgctctggcactttttaagtacaaggaagaggagattttgaaattgcaagattcgatgtctatatttaagtatctccgctacttcactcgcactatccttgatgctaggaagctgatcagtatctcctttggggacctgaaccctttccccctacgccagatccggaaccgacgcgcctaccacttggagaaagtccggctggagctgaccgagctggaggccatccgtgaggacttcctgcgtgagcgggacaccagccctgacaagggtgagctggtcagtgacgaggaggaggatacctgagtgggctcgggatgctgctcttccttccttcacaaccaaagtgtgcccaaagggtgaaagtgcacttaaaagccagaatgtaacgtgtgtgtcctctggggatctgctgggcagatgtcccaagccaggctgcccttcctcatttcccactgtgcggggggcaggggtgggaggtctaatctgtttacaaccatttccgtgccatgcttttggttacacgtatctcagtcacgctttctgcctggttggtggatcctcaggcttaccagtggctatttgcaagagcctgtttccagcctccgtcagcctgtcggtgctctgaccctctgaaaccttgctttgctgggcatctccccatattctctctcctgtacatagtgggcagtggtgtgtggttttgaatggcagtgctataaaggatgccagctgtgctttaggcacctgtaggccagagggttgctgcctcaggcataaggttggtatgaaaaggggctgccttagaaaagcaggcacatcccttgttcagaaatggccactgtaggaaagcctgtgaacctcccaccagtggctttaagctgccagccatgccccatttctagaatagcctttgctcttccacacgcaacccttccatcagtgtcttccagcctgcatggggagggcctggctgcccagacacccaccctcacttctcatggccagcctgtgtttgcagatcactgggctgctctgtccccagcttgccccgtgccaggcatggctctgtgagattctgtggaatgcccttcttgacttgtggaaatcattcaccaagtacgatgggatgggattccaagtaaacagtggaccgtcatattgcaaagcaggcccacgcctgggctggccttggttgaggggatggaggaatgttttcgggggtgctttgcagggcagtggtgcagccgcagcgtgaacgctcttggacagctgaaaaccatggcctccttggggatggccagtgctcctggtgtctccacctgcctgggttgtgcaggaggccggctgccagtgcctggggctgggaaacttttttgcttggggcaggcttgggtgagctctcccagatgtgtgcccaccccaccactgcctggaacatccttgttctctgccaggatgcaggggcactgttgcctctgacacagcagtttctgggaactcagaggactgcctttctgaaggctggggagaggctttgagcaaggagcttgtttttgcttaatcgctctagaccatccctgatgcgtagatgtgagaggatgttttctggcacagtgttatgaaaatacaagataaatgatctcagtggaatgtttcatattacccgaaaaaaactggaaatcatcctttgttgtgaacacactgagactaagaattgaagcaatgcagttttaagaagtatttttcctattttttgctgtcaactttttggcaatgccacggcaaagttggtgtttcagcacatgctagagtgagctccggcttcgtgtctttaaccaactccactaatgtttcactgggtagacggagctggcctctatatttagccagaagcctttgcctcttttcaggcatcaaaaatgggttttgtcattgtctttgtctttgagagcagcagtttgaggtctgactccttcagttgtcctgtgagctgggcgttgcagtctgctcgaatcaagtgttggaaccccccccacccctcagcccatcgtgaaacgacagctgtcagcctggggggcggctgctgaggaggtgcagcaggaatggggctgggccctgaggttttactttccgagccaatggcccctggaacatgccagcacacactgccatgtcctggggctaagagctgcctttagggacaggctcgtgttgtccagtttgccctgagagatgcacctgaccaggggcccgtcgtggctgcaacccacggtggtatgttagtgtttccaggcagttgtcagcagctgccgggcagtgtgtgtgtgcgacagcaggagagttcctggaggaaagggactggggacactttctcagaggttctcctgcctggaatcaagtgatgcgtgtccagaaggcaagagagggcggctccgcctggttaaagtttgggaacgggacggagccaactcctccttccaggactgtgggccccactcttttgcgctaacacttcccctccctcgggtcactgaggaaagagctgctctgtcccctccagtgccctgaaggtccctggcctccactggctgccatggcagggggcccttctgacaggggctgccccaagctgctgttcctcctctgaaccttcaccccaacacccagcccgtggcccctgcaagggggaccctgccagctgggaaacccaaaggcctgtccaaacgtgcgcaccaggaccgaggggagctccctcccaacacctgctaggaattgccaacttttaaatggatggggttttttatgggttgaacctctgttaatacttttgtacactctcactacagtttatatttttataggctattttctcaaggtgtttctagattccacatatctattttatataacaagttattatgttatgtgtgtgactcccttgtgtgtatctgtgccagcctcagcctccgagttgcttttccctctggccctgactctcactgactcaccgatgtgatgtgcaggcccacttcttaccccagatagcctcgggcgctgcctgtagtcatgctgacagctgtacagtagccgccaagactgctgacagctggagacggttctggtttcaactacggtatattgatatcggaagtattctagacagatcctcggttgggttttctagctacatgtttgtattgcacagatccccacctgccatcctatagtgttgtcttcctgtgtgttccggggcttctgggcagctgggcctgcccggggaagtccttgcaggtgggaggccatacagagacccactgtgtgccactgaacgtcccactgctgctgggcaactggaggactgcagggggcgccaggtgactctctccttttatatcacagcagctcctgtgctgaccttcaagttacgttttggaactgtaatactaaaggaagaaataaactactaatttgtataataaaaaaaaaaaaaaaaaaaaa

SEQ ID NO: 925 - protein, 963 aa, Homo Sapiens
MPGAGARAEEGGGGGEGAAQGAAAEPGAGPAREPARLCGYLQKLSGKGPLRGYRSRWFVFDARRCYLYYFKSPQDALPLGHLDIADACFSYQGPDEAAEPGTEPPAHFQVHSAGAVTVLKAPNRQLMTYWLQELQQKRWEYCNSLDMVKWDSRTSPTPGDFPKGLVARDNTDLIYPHPNASAEKARNVLAVETVPGELVGEQAANQPAPGHPNSINFYSLKQWGNELKNSMSSFRPGRGHNDSRRTVFYTNEEWELLDPTPKDLEESIVQEEKKKLTPEGNKGVTGSGFPFDFGRNPYKGKRPLKDIIGSYKNRHSSGDPSSEGTSGSGSVSIRKPASEMQLQVQSQQEELEQLKKDLSSQKELVRLLQQTVRSSQYDKYFTSSRLCEGVPKDTLELLHQKDDQILGLTSQLERFSLEKESLQQEVRTLKSKVGELNEQLGMLMETIQAKDEVIIKLSEGEGNGPPPTVAPSSPSVVPVARDQLELDRLKDNLQGYKTQNKFLNKEILELSALRRNAERRERDLMAKYSSLEAKLCQIESKYLILLQEMKTPVCSEDQGPTREVIAQLLEDALQVESQEQPEQAFVKPHLVSEYDIYGFRTVPEDDEEEKLVAKVRALDLKTLYLTENQEVSTGVKWENYFASTVNREMMCSPELKNLIRAGIPHEHRSKVWKWCVDRHTRKFKDNTEPGHFQTLLQKALEKQNPASKQIELDLLRTLPNNKHYSCPTSEGIQKLRNVLLAFSWRNPDIGYCQGLNRLVAVALLYLEQEDAFWCLVTIVEVFMPRDYYTKTLLGSQVDQRVFRDLMSEKLPRLHGHFEQYKVDYTLITFNWFLVVFVDSVVSDILFKIWDSFLYEGPKVIFRFALALFKYKEEEILKLQDSMSIFKYLRYFTRTILDARKLISISFGDLNPFPLRQIRNRRAYHLEKVRLELTELEAIREDFLRERDTSPDKGELVSDEEEDT

SEQ ID NO: 926 - DNA, 3484 bp, Homo Sapiens
tgccctcccgcggctgcagccggagccgaaggtggtggctgcacagtagacgccccctcacggcttcccccacacgctcccgccccctcgctcgcccatcgcgcttccctcacaggctctgcagtcctcccccacagacgccttcccccttggactctcattcccttttccacggagccccgcgctttcgtgagccccctcgaggaacctggtctccgcatccagttaccacctcctgcctcagaggccatctgagcccttcgcacctcgcccctcagtccccccttccccccccgcccgcgtcgcctcgctccctcccgcccccccatcatcccttccctcgcagttcccctgtcctgaggggagccccgccacgggcagcgcggcggcggcggcaggagggagaaagtgaagcggtagctcgcgcacactcgcgccctcactcccggctaggcggcacccaccgccgggaggaggaggaggagccgagaggagctgagcgagcgcggaagtagctgctgctggtggtgacaatgtcaaataacggcctagacattcaagacaaacccccagcccctccgatgagaaataccagcactatgattggagccggcagcaaagatgctggaaccctaaaccatggttctaaacctctgcctccaaacccagaggagaagaaaaagaaggaccgattttaccgatccattttacctggagataaaacaaataaaaagaaagagaaagagcggccagagatttctctcccttcagattttgaacacacaattcatgtcggttttgatgctgtcacaggggagtttacgggaatgccagagcagtgggcccgcttgcttcagacatcaaatatcactaagtcggagcagaagaaaaacccgcaggctgttctggatgtgttggagttttacaactcgaagaagacatccaacagccagaaatacatgagctttacagataagtcagctgaggattacaattcttctaatgccttgaatgtgaaggctgtgtctgagactcctgcagtgccaccagtttcagaagatgaggatgatgatgatgatgatgctaccccaccaccagtgattgctccacgcccagagcacacaaaatctgtatacacacggtctgtgattgaaccacttcctgtcactccaactcgggacgtggctacatctcccatttcacctactgaaaataacaccactccaccagatgctttgacccggaatactgagaagcagaagaagaagcctaaaatgtctgatgaggagatcttggagaaattacgaagcatagtgagtgtgggcgatcctaagaagaaatatacacggtttgagaagattggacaaggtgcttcaggcaccgtgtacacagcaatggatgtggccacaggacaggaggtggccattaagcagatgaatcttcagcagcagcccaagaaagagctgattattaatgagatcctggtcatgagggaaaacaagaacccaaacattgtgaattacttggacagttacctcgtgggagatgagctgtgggttgttatggaatacttggctggaggctccttgacagatgtggtgacagaaacttgcatggatgaaggccaaattgcagctgtgtgccgtgagtgtctgcaggctctggagttcttgcattcgaaccaggtcattcacagagacatcaagagtgacaatattctgttgggaatggatggctctgtcaagctaactgactttggattctgtgcacagataaccccagagcagagcaaacggagcaccatggtaggaaccccatactggatggcaccagaggttgtgacacgaaaggcctatgggcccaaggttgacatctggtccctgggcatcatggccatcgaaatgattgaaggggagcctccatacctcaatgaaaaccctctgagagccttgtacctcattgccaccaatgggaccccagaacttcagaacccagagaagctgtcagctatcttccgggactttctgaaccgctgtctcgagatggatgtggagaagagaggttcagctaaagagctgctacaggtgagaaaactgaggtttcaagtgtttagtaacttttccatgatagctgcatcaattcctgaagattgccaagcccctctccagcctcactccactgattgctgcagctaaggaggcaacaaagaacaatcactaaaaccacactcaccccagcctcattgtgccaagccttctgtgagataaatgcacatttcagaaattccaactcctgatgccctcttctccttgccttgcttctcccatttcctgatctagcactcctcaagactttgatccttggaaaccgtgtgtccagcattgaagagaactgcaactgaatgactaatcagatgatggccatttctaaataaggaatttcctcccaattcatggatatgagggtggtttatgattaagggtttatataaataaatgtttctagtcttccgtgtgtcaaaatcctcacctccttcataaccatctcccacaattaattcttgactatataaatttatggtttgataatattatcaatttgtaatcaattgagatttctttagtgcttgcttttctgtgactcaactgcccagacacctcattgtacttgaaaactggaacagcttgggaatgccatggggtttgataatctgccagggacatgaagaggctcagcttcctggaccatgactttggctcagctgatcctgacatgggagaacaaccacatttttctttgtgtgtgcttctagcagctgttcgggaggaccttgacccaatagtgttcccatgctgtttcttgtgaaatgctctcggctatgtagcagcttttgattccctgcataccctaggctgctgcccctatcctgtcccttgtttataacattgagaggttttctagggcacatactgagtgagagcagtgttgagaagtcggggaaaatggtgactacttttagagcaaggctgggcatcagcacctgtccagctctacttgtgtgatgtttcaggaactcagcccctttttctgcctaggataaggagctgaaagattaacttggatcttctaatggtccaaatcttttggtcacaataaagagtctccaaattagagactgcatgttagttctggatggatttggtggcctgacatgataccctgccagctgtgaggggaccccgtttttaagatgcatggccaagctctctgcaaatggaaatgcttacactgggtgttggggatgtttgctacctcctgctatttttgtggttttggttctcccactatggtaggacccctggccagcattgtggcttgtcatgtcagccccattgactaccttctcatgctctgaggtactactgcctctgcagcacaaatttctatttctgtcaataaaaggagatgaaaatattctaaaaaa

SEQ ID NO: 927 - protein, 553 aa, Homo Sapiens
MSNNGLDIQDKPPAPPMRNTSTMIGAGSKDAGTLNHGSKPLPPNPEEKKKKDRFYRSILPGDKTNKKKEKERPEISLPSDFEHTIHVGFDAVTGEFTGMPEQWARLLQTSNITKSEQKKNPQAVLDVLEFYNSKKTSNSQKYMSFTDKSAEDYNSSNALNVKAVSETPAVPPVSEDEDDDDDDATPPPVIAPRPEHTKSVYTRSVIEPLPVTPTRDVATSPISPTENNTTPPDALTRNTEKQKKKPKMSDEEILEKLRSIVSVGDPKKKYTRFEKIGQGASGTVYTAMDVATGQEVAIKQMNLQQQPKKELIINEILVMRENKNPNIVNYLDSYLVGDELWVVMEYLAGGSLTDVVTETCMDEGQIAAVCRECLQALEFLHSNQVIHRDIKSDNILLGMDGSVKLTDFGFCAQITPEQSKRSTMVGTPYWMAPEVVTRKAYGPKVDIWSLGIMAIEMIEGEPPYLNENPLRALYLIATNGTPELQNPEKLSAIFRDFLNRCLEMDVEKRGSAKELLQVRKLRFQVFSNFSMIAASIPEDCQAPLQPHSTDCCS

SEQ ID NO: 928 - DNA, 5480 bp, Homo Sapiens
agcttaacaagaccatggcctctggacccgcgatcagctcgctgtgtggtcctgagcagccacccaacatctctgggccttggattcctacctggcctttcttctggatgcatcatttttgcctttaggtatctggaccattcccccccatggatgataaagtctttgcttcacaccctcaggattaccttaaaggcctgaaaagaacagaggaggagtctgaggaggtgaattccagccgtgctcttgcaggctggctgggcagtgtgctggggaggagagggagcctctggctgggcctcctccaccgggcctggtgtgctgggaacaccccgcattgtcccaaggcctcagatttgactttcaaagggaaaacagctctcctgataaaggacaccattggagaaactgggcattttaccaaggatttgactggaatggcatgcttcctttaaagatgaaagttgacttttagagccaattaaagccctttggggaatctggcctcataccttgtccacacagagttcctgtacaaggttcctgacctgtgggaagcggcacagcaccagctaggcagagacgccccaggccatgttagagctttgagtgaggcctggtaacagggaggcgctgtcacctactggccttgccaatccagctccaagatgctgagcctgaagctccccaggctgtttagcatagaccagataccccaggtgttccatgagcaaggcatcctgttcggctaccgccatccacagagttctgccactgcctgcatcctcagccttttccaaatgaccaatgagactctcaacatttggactcacttgctgcccttctggttctttgcatggaggtttgtgactgcactgtatatgacagacatcaagaatgacagctactcctggcccatgcttgtgtacatgtgcaccagctgcgtgtacccacttgtgtccagctgtgcgcacaccttcagctctatgtccaagaatgcccggcacatttgctacttcctggactatggtgccgtcaacctcttcagcctgggctcagccattgcctactctgcatacacgttcccggatgcgctcatgtgcaccactttccatgactactacgtggccctggctgtactgaacaccatcctcagcacaggcctctcctgctactccaggtttcttgaaatccagaagcccagactctgtaaggtgattcgtgtcctcgcctttgcttatccgtacacctgggactccctccccatcttctacaggctattcctgttcccaggggagagtgcacaaaatgaagccacctcgtaccaccagaagcacatgatcatgaccctcctggcctctttcttgtactctgcacatctgccagaacgcctagcccctggacgctttgactacatcggtcacagtcaccagctgtttcacgtgtgtgtgatcctggccacgcacatgcagatggaagccatacttctggacaagactctgaggaaggaatggctcctggccacctccaagcccttctctttctctcagatagctggagccatacttctgtgcatcatcttcagcctcagcaacataatttatttctcagctgctctgtatcggattcccaagccagaattacataaaaaagaaacatgactcagaccataagcttttcatgccagatgtcaacattaagctgcaacatcctaaccaccataagccggaggtggttacagcttatcatggcctaaaatattcataatggttggtgtcttttgaatgaattcatgtcaaaaatgttattcagctggggaaatttctctaaatgtacactgattctgtgtgtgtgattttaaaaggagaatatggttcaagcaagtccttgttaaggcaaactattgatatttcattaattttaaatttacttaaaatgtggttttaaattctatttaaacatttggattaagcatattactctggagctttgtattattctttaaaaatgaatcttgcttcatttgatgaatttcatgtcacaaagcttctctcaagagctctcgtagtggcctgtcaaccactttcggagaatgagccaggtcagtcactgggaggacctgtgaaagaaagttggtcactgagtgccttggggactggcaaaacattccagaatgaagagagctgtctggggagagcccttcttcccttctccacctagtgaagggagaacagaaggggagtcctctcttcccacaagtccattctgccttcaaagtgtaagttctcatgtcattatggatttggagtttgtcagtttttttcttaaaagtccacagcggggtgtcatgtgttctgttatgttctgttttctggttgccagtttgatctgcaaagtatttttcagtgcaggtaaaatgtgttaaaccataagagttgactgagttaatcccaattggttgtgctcatatgccaccttttaaaccaatggaaattgctatatttggggatgtcatacatttgatattgcttcagcatttcaaatatgttgcaaaatttagtatccatatgcataagaagttaatcaccttgccagtggggtggtcacatatagtgttctcaagctttactgtgaatcagaaacatccagtaagcttgtgacaaatgcagactcctagggaaaaccagggggttctgcttcactaggttaaatgtaggttttgtagaggagatctgcactggagcaagtctcccagatgattctaatacaggagggccagaggccaaacttgaagaactgctggtgttacatgttccaaaaggcattagacctatcagctttgtttcgcctgatctcaagttttagcaactcaccaactaaggcgtaacctcattttatgttccagcgttttctactctgaatagttctaaaacactgagcattttctcatttgttgcattactgattaaagttcagtatttcatggtgttttcagggaacacagaaatgcggatgcaaaacaacttttgacagaggcccatcaaacccagatctgcacttggtaatgacttaggggggcttcctcacaatgcaggatcctctttgctgactcaggaatactccatattttagactactgcctctaccattaactagcccagacatttgaatggccttgtaaacagctcactgtctaatactcgaaggacaagtaacaatttatattggatgagagtggtcaagaaatatgatttcgttagttttattatctgtttacttcctctggggaaggcagactgataaaattatatgggctggtaaatttttggtacattaattgcaagctgcatgacaaaatttgtttttctggcaacaatctgacattattagtggaattccacaccaacagggcttgtgagcttccatttcatcttactgtaacttcaattttatggcaaaaaaaggtacaaagtttaaatacccctttctagtaatgccaaagacatacagtgttttacattctctcctttataggtaacaaaataatgtttagctcagtaagtactgaaataatgagtgaccaatttgaaggatttttagattatttaatctttgcttatgttgctttttcacatgcttaatgatggaaatgaaatgttaaatcaacaaaataagatccagtgtttcataacatttttataagtttggtaaactttagtcccattatatacttttggggacagtgttataaatcagaattttacgacagtttgcagaacactgatttgaaagcttcctatgcaaaatgagaaggggttcaaatatattaattatcattaagtattaaataataggcattagatgtctaatgtgagtataatttcatccaagccatctcagaaagtctaaaaggttggcagggggtcagctgaagacctcactggagtgggtcttaatttttaaaaagtgtctcactacatttaagacatgtgacacattcccattggtaacaattgctcaccatggcattgtctcaaaaaagactatggtggggagggtggcacattcctaatgggatgtacctctccccactccccttgcttgagaagcactactcaaaaatttaccagaccttacaactgtgataaaacttgaatgtgtatgatgaataaggccattcagttaactttacctccctttacccattgaaggggttccttttccattgctcagtttttagaaaataattctcatcttttttctaaagaaatgaatttgtggctggtctgaaggtagtgagttagctcaattgattgttcgcagtcagttatagatcaagctccttgttctactcttcccctcttctcactactgcacttgactagtcttaaaacaaagaaagaacgaatgaatgaatgaatctgtggctggatgcagtggctcatgcctgtaatcccagcactttgggaggctgaagtgggaggactgcttgggcccaagaattcaggaccagtctgggcaacagagccagacactgtctctataaaaaaaagttaaaactagctggttgtggtggtgcacacctgtggtcccagctactgtggagggtgatgtgggaggattgcttgaacccaggagttggatgctgcagtgagctatgattgcgccattgcgctccagactgggcaacagggcaagaccctgcctcaaaaaaaaaaaaaaaagaatttgtaattgttggtaggatgttatgggaaatttagaggtcttctgagtataaagtggtttaaatatttggtctgctgaagtctttctggaagtgttgttccccctgctgccccgcccagtagaaacttgctcatatgagaggttctgaggtaggtgcggtgtagtagaatggcattgtcagatatgttcaagaaacccttcatttgacactattttgtaccttatggtaccctttaacattttttaattaaaaaaaatattttttgagacagggtcttgttctgttgcccaggctggagtgtagtgttgcaatcttggctcactgcaacctctgcctgacaggcttcagtgatctttccacctcagcctcctgagtagctgggactacaggtgcatgccaccaagcctggctaactttttgtagagatagggttttgccatgctgcccaggctggcttagaattcctgaattcaagtgatttgtctgcctcaggctcccaaagtgctgggattacaggcatgagccacactgcacccagtccatgctaccctttttatatgaaacacctattaacacggtacaacaacacttcaaaacatattatttgaatttcggcctctgattttctagtcaacaatccattaaggcaaagacctgtttccaaactcagatgttctccaacttacactaatgtctggttttcttgaactatgtgagagaaaaaaataaacagaatttatttattataaaa

SEQ ID NO: 929 - protein, 330 aa, Homo Sapiens
MLSLKLPRLFSIDQIPQVFHEQGILFGYRHPQSSATACILSLFQMTNETLNIWTHLLPFWFFAWRFVTALYMTDIKNDSYSWPMLVYMCTSCVYPLVSSCAHTFSSMSKNARHICYFLDYGAVNLFSLGSAIAYSAYTFPDALMCTTFHDYYVALAVLNTILSTGLSCYSRFLEIQKPRLCKVIRVLAFAYPYTWDSLPIFYRLFLFPGESAQNEATSYHQKHMIMTLLASFLYSAHLPERLAPGRFDYIGHSHQLFHVCVILATHMQMEAILLDKTLRKEWLLATSKPFSFSQIAGAILLCIIFSLSNIIYFSAALYRIPKPELHKKET

SEQ ID NO: 930 - DNA, 12926 bp, Homo Sapiens
gaggcccggaggaactcggagggggagggagagaaaggccgagacggagggagccagcggcggccgaggggctggtccaggcgcggccgctaagaggagaccaagaggcgggggctgcacttgacaaccagcatgccgagatggcacaccttgggcccaccccacctccacatagccttaattacaaatcagaggacaggcttagtgagcaagactggccagcatatttcaaggtcccatgttgtggggttgatacatctcaaattgagtcagaagaggcagaagtggatgtgagagaaagagagacacagagagacagagagccaaagagggcaagagacttgactttaagagactcctgtactgacaactccatgcagttcggaaccagaacgactacggctgaaccagggttcatggggacatggcaaaacgctgatactaacctcttattcagaatgtcccaacaggccatccgttgcacactggtaaactgcacatgtgaatgttttcagccagggaagattaacctgaggacttgtgatcagtgtaaacatggctgggtggcacatgccttggataagctcagcacgcagcacctgtaccaccccacccaagtggagattgtgcagtccaacgtcgtgtttgacatcagcagcctgatgctctatgggacacaagcagtgcctgtgcggctaaagatcctgctggaccgtctcttcagcgtcctgaagcaagaggaggtactgcacatactgcacggccttggctggactctgcgggactatgtccgaggatacatccttcaggatgctgctggcaaggtgctggaccgctgggccatcatgtctcgagaagaggaaatcatcacccttcagcagtttctgcggtttggagaaaccaaatccattgtggagctgatggcaattcaggagaaagaagggcaggccgtggctgtaccatcttcaaagacagactcagatataaggactttcattgagagcaataatcgcaccaggagtcccagcctccttgctcacttagagaacagcaatccttccagcattcatcacttcgaaaacatcccaaacagccttgcatttctgcttccattccagtacataaaccctgtctcagcaccactgctagggttgcctccaaatgggctactgttagagcaaccagggttgaggctgcgggaacccagcctttcaactcagaatgaatataatgagagcagcgaatccgaagtttctcccacaccttataagaatgatcaaacacccaatagaaatgccctgaccagcattactaatgtggagcccaaaaccgagccagcctgtgtctctcccattcagaattctgccccagtcagtgatctaaccaaaactgaacacccaaaaagctcattccggattcatcggatgagaaggatggggtcagcctctaggaaaggaagagtgttctgtaatgcatgtgggaagacattctatgacaaaggtactctcaaaattcattacaatgctgttcacctgaagatcaaacatcgatgcaccattgaaggttgcaacatggtctttagctccctccgaagtcgtaatcgccacagtgcaaaccccaatcctcgccttcacatgcctatgctaaggaataaccgagataaagatttaattcgggccacctcaggagctgccacccctgtcatagcaagtacaaaatcaaatctggcactcacaagccctggccgacccccaatgggttttaccactccccctctagaccctgtcttgcaaaatcctctccctagccagctagtattttctgggctaaagactgtacaaccagttcctccattttatagaagtttactcactccaggggaaatggtgagtcctccaacctccctcccaaccagtcccatcattccaaccagtggtaccatagagcagcaccccccgccaccctctgagccagtagtgccagcagtgatgatggccacccatgagcccagtgctgacctggcacccaagaaaaagcccaggaagtcaagcatgcctgtgaagattgagaaggaaattattgataccgccgatgagtttgatgatgaagatgatgaccccaatgatggtggagctgtggtcaatgacatgagccatgacaatcattgtcactcccaagaggagatgagcccaggcatgtctgtgaaggacttttctaagcataacaggacccggtgcatttcaaggactgaaataaggagggccgacagcatgacttctgaagaccaagaacctgagcgggactatgagaacgagtctgagtcttcggagcccaaactgggcgaggaatccatggaaggggatgagcacattcacagcgaagtgagtgaaaaagtcctgatgaatagtgagaggcctgatgagaaccacagtgagccctctcaccaggacgtcatcaaggtgaaggaagaatttacagaccccacttacgacatgttttacatgagccagtatggactgtacaatggtgggggtgccagcatggccgccttgcatgagagctttacatcgtctctgaattatggcagccctcaaaagttctccccagaaggtgacctatgttctagcccagaccccaaaatctgttatgtgtgcaagaagagtttcaaaagctcctacagtgtgaaacttcactacaggaacgttcacttgaaagagatgcacgtctgcacagtggctggttgcaatgctgcattcccctctcgccgaagccgagacagacacagtgccaacataaacctacatcgtaaactgttgaccaaagaactcgatgacatgggcctggactcgtcgcagccctcccttagcaaggacctccgcgatgaatttttggtgaagatatatggtgcccagcaccccatggggctcgatgtcagggaagacgcctcctctcccgcagggactgaagactcccacctgaacgggtatgggagaggcatggcagaggactacatggtccttgacttgagcaccacctccagcctccagtccagcagcagtatccattcctccagagaatccgacgcaggcagcgatgaggggattcttctcgatgacattgacggggcgagtgacagtggggagtcggcacacaaggccgaggcccctgccctccctggcagcctaggggctgaagtttcaggatctcttatgttcagcagcttgtctgggagcaatggtgggatcatgtgcaacatttgccacaaaatgtacagcaacaaggggaccctgagagtgcactacaaaactgtgcatttgagagaaatgcacaagtgcaaagtcccaggttgcaatatgatgttttcctctgtacgaagccgaaatcggcacagtcagaaccctaatctccacaaaaacattcccttcacttcagtagattagtctcagaatggacactacaaatgccagctctcaccagatggcctacgtgtttgaactgccatagtcagtgtgcgcttatgtacttggggtgtgtgtgtgtgtgtgtgtgtgtgtgcatttatgtatgctctgtggctacatatacacacacgtatttccttgagataaacaagataaacactaggtgcttttgaatttttttcacttccctttatagttttgggaaaggagtgggatctttgatttcagggtgaaaacagagtacccctttaaacacacacacacacacatgcacatacacacacacacacacacacacacacagtgtgcaactagccccagttttgacagaataattcttggtcttccccaaagagacaatttgttgtacccatgactgttgcctgcaaaaataaaagggaaaaaaaagaaaaaagaaacaaaaaggaacttcttatagttgtcttttgtgaactttaaggttttgaaagaatcttcaattaaagcatggcagattcacctgtaaatatttagccttgaggggccattgatgtaaaacaattgtattgatggttgtttaacttttttgtttaatttttacagttacatccagctgttagatatgcaggaaaagatagtttgctggctagctctattcatttatgttagcattaatgcacatttttaaaaaaagaaaaaaacatggtcttgtttttactacctgttagatatagtgctaaagaggtgctggcatgctttacagcacagatctgattttttaaaatgtcctgtactagtacataaatcccgtcatgcactttttttcatacactacaaggggatgtgtaataaccatgcttcttttttatccttaaactattgccatacttcagtaagtgtcttttttaaaaaaaattcacttgtataaaaatggtctggtcagtatagggcacaaatgccaaacaaagtattagtgttaacacaaaactgccaactttgcacaagtttccagaaaagaaaatacaattagtcactcaacataaccacaggccaatttgttggccaccagaaaaccgctttttaaaaaaacacttggtgattctttcaagtgccgaatgttattagaatcaacattgcatccttcttgcttatacgttaagttacataaaaggaaaacaaaattatgtggtgtgaaacagccaaggcatttattcttcagaggcaggataatatttcaggatacaaaagcccaaattacccgctacggaacaaagatgaatacagtaaaagagtcgaacactcatttccaaggccctaacccttatcctttaaaaagaaatcctctgaactgggtcggtctgttgtatggctgtctaatttgttgcaaattctgcagtcgtactataattcaggcctgtttggtagacaaaatcaaaaggcatttaacagcagcagtacttggaagctttgaaaacatgtgctaaacttgaatggagcaacactcctttctgaaaagccagaagaagggggttttaaagcaggatctctcaatgttcagtgttttgtgtttccccacacgatttgtcagagagaaatgaaagcaagcctgaaaccaagcaattgagagtgagaaagaggagagagactattctccaaaccttttttgttttgttttgtttccgatgtttacacatgttgcctgagctggttaaccacatcggcagcctcagctaccacaacatactgactaaatgatgatatttactcaagttcagtctgcagccaaaaccattagggtgtgcattgcagactgttttgttgtcttttttttttcttttttcctttttttttaagtggaggggaaaagaagagataaacaaggaatattttgtcaaacagtacacaataatttaaagagaatgtatttcttttttgcatttaatggcctcagacatttctttcatcagtctaaaagttagaaatatccctttattttaacttttatgtcgtttccatttttcatgtttttgtaattattttttctatgttcacatcagcattcacttccgttaaatttgccaaaggaaactgttaatatgtttctgttgttattattcctgtaggatttattgtacctcacagtatttattgtttcccaaaataagcatcattagttggggattcagtatttttgttgtgaaaatttcagaaacaatagattcttaaagataagctagctatgtctaggagctttatcttttcacctccttcagaggatgctatggggtccattttaattcttcatttgttctacggggaggaaagaccaaaagtatttgcagtacaaaagaaactatatcaaacactatgttaaatgacaagtgtttatggtaaaaagctgaggaattagtaataatcgtttttgttttcttgtactttgaattccccaaagtcttaattgctttattttggtgttgtgttaaattgaacagacagatgttttcctttgttttataccatataagactctgtacagtatgtttgtgaaagattgaactagaataatgaaagtttgtttgcaaacattttggtcctctcagcgttctctgtgttgtgctgttgccccattaccaaatggttagattcaaaaagggtgggaaaagatttttaatatcccaacaaaacattatagaaactctggcttttgcagtgtgcatagactacatgtagttttatgaaaataaatacacatttttatttcagcaactttgaaaagttacactcagttgagttactagaactcatcttgtacaacagcaatgtttagtctgtttaatttaatgtcaaataaaaggtcagatagccctcgtgagtgaattacatagctgtcggcagtcacatcagcaaatgcaccaggcttagaacaaatgtttgttacttgctgcaaaccaagctaatgtgtatagccagttagaaaaagtccagaagtaatgagattctagaagtagagtttcccttgcttggaaacatgaatgtgttcacctgtgttttgtcagagaagtggcaataagtcctggacagctgacactttttaagtatctcccctatttgctactacttttgtgcctcaagtgcccagtcgttacggtggccttctaaatgagtaaataacattttccaatataaagcctatttgcttaaaagggacaggggagtggatggatgtagtacatgcaatggaaaatcataaaatgtacaattcttctgtttccaaagtattgctcgttcttgagtgtgtgcctgagtgtcttgttttgacttaactagaattctagttaagatggtgatcccatggcttatttgcaaacaggaaggataaagagatcagcgttttagtcatggagctcatctttgcccattcctactcatttgctttttcataggagttttttgttgttaaacagtttctctcaagccacatgcattctatgctggctgaaaattaatagtgatgtagatgttcatccgacaagcttttccccatgtgattggttttagccagagtttatcacaggtacaaaattaggcggtatgactgtgcatgttctctagctgatgttgaaacttgtactgtcttgatcatttaaaactatgtttttgtaaatatcaggtttagtccgctttcgggaatatctgcatgctatggaaagagagaaaaaaaggatagataatgaggaatttggtttaaaagtgtgataaaaatccttggcattctttgttctgatattaattgtatttaaataagtcaacccaatgtaactcattccagatcttagtccagctgccctgttcagcctgatgccttttaaaggtttaaaggtgttaatgttttccttttcaacatggcaaacattttttaaaacctttttggcacaatggtgccactgtcctcatagtgttatttctttggtcatgaattttcaggcccttccagtaagaggagaaaggcacttaactggttaacagccccattattatacattgctctaaggaaaaaaaaaaaaaaaaaactttgaatatatcaagaatgggctattccagaggcttctcctcaggagaaactatgcactaggttcccaccaaatacaatgtgacctttttttcccctttctctgtacacaccccagatatgtgccaagcaaatgagaatgagggccgttgacaattaaagcataaagaagctagtcaccagattgagatggacatgctgctaactgctgacagcttgacctgagcagtcctaacttgtatctggtctgttagcattgggttagattgactaacagagtaaataaaattcacctgtcataagacacgctacatctgctatcatcaagaaacaaatcatccagaagaaactttttttcatcctgtggtcacacccttttcttaagagcttcttttttaaaattatgacaaacgaatttcattctttaaaatcacttatcttctcccaaacttgaagtatttaaattaggtggttttgcttttccctctcattgtttattttttggggatggatctaaatgagtaagatgagcaataaaagataccagaaagactggagggatcacagtgttttcatcagaactaagtagagggtcggttcctgccctggttttggggtagctagaaaaggaaatcatgaatgcactggaaatgttggctcgagagaaaagactggcatagctctgcctcgcagtgggtgagagcgtattgatcgtagggacctgcagagttcctatgaccaggtgagtcggctctgaggaaggggttaggaaagcaagtacagctgcatgaaatagctgaagttcctttggggtcaggaagagccgacaattgtggggttttggttgcttttgctttgtttttgagtgggaagtgttgctggaatcccctgagaaccgaaagatgccaggggtcagcaaggctatagaaaaggccagtggtaacacctcgttttcatcctaacagaggagtaggtgcgaatggcaccagcatggatcgttcctttcttgatcattactcatgcttgccactgtagcaacacaacaaagccatgattgtaattaatactaggctaaagaccttgatcaaaatgggagctcatttactgttctatgaggtatgtaagtaacttctcttcacattttccctcagagataaaccacacgtggtagtcttgtttgcgttagtactaaggtcatgtttgatctgtcccagacgagtcgcatatttcctgtagctggagtgttgctcaccataaatggtcattttcaaaaagtattgtgtaattccagctgtacaactgaccagtgagttatctgtcatcactgttgcccacatacccgtccttccttgtgtagtttcatcatcctcatccttcccacatcttgcgcaaaatgattttctgtgctcattcggcaataactatgttattcggcatactgtctttttggcatttgttgaaaaatccaaatgcttttaatccaaaagattaatccaaatcttttttaatccaaatgattttaatccaaatccaaataacaggaggttaaaaaaaaaaaaaaaactaagcatttttacatgtacactgaattggatcagcattattgttcattataatgctatatatatttttggagcaacatactatagttgtcataaaactatctttattcttctcctctaaagtgctgttgtaaattcatttgacctttactgcaggaaaaaaaaaaatcttttttatataggatatgaagaccaaggctcagtctgtaacaaatagtggaccattacaaaagaggaaagaaaaaagccagggctgagcagcaagaagcttcagttcaatttcacctcgtatctttctaataacatacttgtcactttattaccttccagtaatgtgaacgctgctgacaagactgtcacactaacagcagacaacaccctctctgcttcagcccagctctcctggctacttattgccctggccctgaagggacacaaactaatagtgtgctttccagttcagcacttggccatcaaatataaaaggatgcgtaattgcctgtttatccccttgtgaaggagaaattgactacaagggctaggctttcccatcgagttccctgatgtacacacacatccacaatcagtcagtctctctctctctctctctctctctctctctctctctctctctctcccctctctctctccttccctcttattctcccctcctaacatacaagcacatacacacacctactgtatctgtgggaagcccaaggctgcctctcgatgccctctccagctattaagtggacagtaacaagatgacttcttaaataaagggtcagtagagagatgctgtctgtgacggcatcctttgcttctttgaaaacttaagtgttaacaattccatcttgagagtaatgggtgtggccctataattagagcaaattttcctgcaagtcagtggcataagtaagattatattgccccctaatctgtagggaaaagattaaaatatttttcttccccttcaaaaagtgcacatgttgtaaactggttacgcacagtggtcatttttttttcttatccttggcatcaaaccatggacgtaggtgtacaaatgcatctttcaatgacccctccaaatccatagtgtaacatgatagattaacttttgtcaaactggactgacaatctaaaaaagatggcgtcaggcttttgactttaatcgttaaaacaaggaccaccctatgagtaaaaggtaaattctccactttgaagaactttggtaagtacaagtacagggagctttagaaaatcgagtgatggggaccaaaggtacaaaggaagaatacatgaaaatgttatattccaaaatgccctgagcccaaagattggctgctatttttgtatattgaaatactcaaatgatggttggaaagtgactagttagtgactaaatgaagtgcaagatctatcaagcgtcttctttctgggactaggggatgccatgcttccttccaaccttcccgcagcgcatctcagagaagatagttggccccattacaaacagtcacatttcagtaagatattagtcagccaggtaagacacgtgcaggtatcggtatcatcttccatatgaactttagcaaggagagaacagcagcagatttagggatagacaatgtaacaggtctatgttgacaaatctgtgctaaataatttcatgaaccagtgtggggactgggaagaaaagcactttgagcaaggactcttgggttcgagcaaaggcaattagttgacatgatacttcttaagttcctcagtatgtatatgttacaatcgtttatcagacatcttaatagaatcctaattgaaaaaccagttgccaaaattgcacaagttctgctcgctgatactagctttctccccttaactctaaaataccagggatgcttaaggacgtttgtaatagtttttttaatgctttgtttcacttttttaaaaaagaatctttgaagggaaggaagagcagaaagaagtattttaagaaaaatggagagaagtagatagtattgaaagtatatttcttgaagagagagtatctaagtgctataccaagattttatagggcttcctgttgccaaatgtgatgttgagataatgcacagctaagatggcaaatccatcaattattaactggctctgcccacttctgtcatggaatgcaaggattgagaggtgactctggggagaccctgggtgtgtgagagagctccattcatctggccctggatatgtttttcaaaagagagggagaaagcgccagtccctgcaaggtgaactgacctggcactgtttcagtgggagcctcactgcctgccttttccatgctaggagacaaagcatcctctaccccatctgtgaatcggtgctgtggccactgcgagaagcatgattcatgaggtatgatgctcttgagctcccagacaatgtgctgagttaataggttcacttgagatgtatacaccaaggctgtttctttttttaaatctagtccccaatttggagtatttttgcatgtttttgtacagagtaatccattcctctcattgtgtatcttaatctcctctgacttttccattgtctttctcaatcccaccctttgctcttcggatctcaccaaccccccttaaaaaataaatcatgtttgagcaagaaggtagaacacgccctccctcatcttggttttaattgctttggaaacgtgttctaccctgtccagggtttgcataacgtgaattaagtgaatgagatgttctagtattatatcttaacctgataagactatctaagatttctagtatatggtgcatttgctttcctgtgcaaactttggttcagctgccctgcagagaatctcaccattttcctgccagtgccagtataaagaatgcaggagagctaaacctgggtacatgaaggtcagaggggtgaggacggtcgagaaatggggagaagacttgggcttgagacgacctgggcttttcatgtgtagctcactcagcagtatgaggatgactgacacaccagtgggtggtttccaagtgaggcaaatgcccatttcccctctcccctcacaccttgcctggcttcttccatgaagtccttgctgcttttctgcctccccaaaggtgaggggaaggggctggttggggatctgggaaagccagttctctgttctctcctgctggtgatggactaggccttttagaactagcaagatccctcacacagctgggagaacacacacctttcttactccagacccattggtgtgtctccagtaacaaaattattggactcagcctccatatttgacagcaaaagtggccagagggagttgaaatatcttgaagaaaaggaattttcactaagatatgtcctctccctctcccagagtttagctgtttattccttttttttgtttatattgttctcatctgcataaaaccagtctcttgcaataagcctgccgcagaatcaaagtctgtacttcaaaaggtaactgcaccaagggatgggacagtgtgcatcaccctgatctaatcattgtgacgttggtagcttcctaaatactgtatgtaccttgaacaagggttttatttttgttttgttctgttttgctttttgtttttattggtaggctaaggtaattaaattttttaatttgctgttactttggttgtattttctgtactataactgcctacagtatgtcttttgcataaaatgcataagggtttggggatgtaaatggaattttattcatattttgtccaaatacctcttgtaatttgtatcaaaattcttgtacaatttttatattaaagatttatcagtcactga

SEQ ID NO: 931 - protein, 1099 aa, Homo Sapiens
MAHLGPTPPPHSLNYKSEDRLSEQDWPAYFKVPCCGVDTSQIESEEAEVDVRERETQRDREPKRARDLTLRDSCTDNSMQFGTRTTTAEPGFMGTWQNADTNLLFRMSQQAIRCTLVNCTCECFQPGKINLRTCDQCKHGWVAHALDKLSTQHLYHPTQVEIVQSNVVFDISSLMLYGTQAVPVRLKILLDRLFSVLKQEEVLHILHGLGWTLRDYVRGYILQDAAGKVLDRWAIMSREEEIITLQQFLRFGETKSIVELMAIQEKEGQAVAVPSSKTDSDIRTFIESNNRTRSPSLLAHLENSNPSSIHHFENIPNSLAFLLPFQYINPVSAPLLGLPPNGLLLEQPGLRLREPSLSTQNEYNESSESEVSPTPYKNDQTPNRNALTSITNVEPKTEPACVSPIQNSAPVSDLTKTEHPKSSFRIHRMRRMGSASRKGRVFCNACGKTFYDKGTLKIHYNAVHLKIKHRCTIEGCNMVFSSLRSRNRHSANPNPRLHMPMLRNNRDKDLIRATSGAATPVIASTKSNLALTSPGRPPMGFTTPPLDPVLQNPLPSQLVFSGLKTVQPVPPFYRSLLTPGEMVSPPTSLPTSPIIPTSGTIEQHPPPPSEPVVPAVMMATHEPSADLAPKKKPRKSSMPVKIEKEIIDTADEFDDEDDDPNDGGAVVNDMSHDNHCHSQEEMSPGMSVKDFSKHNRTRCISRTEIRRADSMTSEDQEPERDYENESESSEPKLGEESMEGDEHIHSEVSEKVLMNSERPDENHSEPSHQDVIKVKEEFTDPTYDMFYMSQYGLYNGGGASMAALHESFTSSLNYGSPQKFSPEGDLCSSPDPKICYVCKKSFKSSYSVKLHYRNVHLKEMHVCTVAGCNAAFPSRRSRDRHSANINLHRKLLTKELDDMGLDSSQPSLSKDLRDEFLVKIYGAQHPMGLDVREDASSPAGTEDSHLNGYGRGMAEDYMVLDLSTTSSLQSSSSIHSSRESDAGSDEGILLDDIDGASDSGESAHKAEAPALPGSLGAEVSGSLMFSSLSGSNGGIMCNICHKMYSNKGTLRVHYKTVHLREMHKCKVPGCNMMFSSVRSRNRHSQNPNLHKNIPFTSVD

SEQ ID NO: 932 - DNA, 2380 bp, Homo Sapiens
gacttcctgatttgcaagaaggtgcaggagccgcagcgggcggccccggtcgcaggaactgagaggcctcagctttggtggcggctaccggcggagacgggggcggcggccacgccaccgctgctgtcacagaaaggctctggtgggtggggtgggaggcggggaagtgccgggggcgcagccgacatgggcccgccgccacggctgctgtgagcagcctctttccctgtgtggccgccggcgtgggcggggacggcgcgaccctcgcgcggccgggctgcgggcttccaggccagcgcgcgggggccggacggacagccccacaccgacatgtaaccatggactgcaggaccaaggcaaatccagacagaacctttgacttggtgttgaaagtgaaatgtcatgcctctgaaaatgaagatcctgtggtattgtggaaattcccagaggactttggagaccaggaaatactacagagtgtgccaaagttctgttttccctttgacgttgaaagggtgtctcagaatcaagttggacagcactttacctttgtactgacagacattgaaagtaaacagagatttggattctgcagactgacgtcaggaggcacaatttgtttatgcatccttagttaccttccctggtttgaagtgtattacaagcttctaaatactcttgcagattacttggctaaggaactggaaaatgatttgaatgaaactctcagatcactgtataaccacccagtaccaaaggcaaatactcctgtaaatttgagtgtgaaccaagagatatttattgcctgtgagcaagttctgaaagatcagcctgctctagtaccgcattcctacttcattgcccctgatgtaactggactcccaacaatacccgagagtagaaatcttacagaatattttgttgccgtggatgtgaacaacatgctgcagctgtatgccagtatgctgcatgaaaggcgcatcgtgattatctcgagcaaattaagcactttaactgcctgtatccatggatcagctgctcttctatacccaatgtattggcaacacatatacatcccagtgcttcctccacacctgctggactactgctgtgccccaatgccatacctgattggaatacactccagcctcatagagagagtgaaaaacaaatcattggaagatgttgttatgttaaatgttgatacaaacacattagaatcaccatttagtgacttgaacaacctaccaagtgatgtggtctcggccttgaaaaataaactgaagaagcagtctacagctacgggtgatggagtagctagggcctttcttagagcacaggctgctttgtttggatcctacagagatgcactgagatacaaacctggtgagcccatcactttctgtgaggagagttttgtaaagcaccgctcaagcgtgatgaaacagttcctggaaactgccattaacctccagctttttaagcagtttatcgatggtcgactggcaaaactaaatgcaggaaggggtttctctgatgtatttgaagaagagatcacttcaggtggcttttgtggaggtaaagacaagttacaatatgattatccattttctcaataacaattttcttggtctttgcacttgtgtctgataaaacctatttcataaacaactaatgatttcctcctaaatatgtaatgtcttaaatacatttttcatcttataaaagctatggaattagcttattttgcctgatacctgttactcaaggcattaagttggcctcctgaattggcagctgttggcctcgataatctcttaatattgctggaaattagtaatacagaaatccaatcaactcatatcttcctgtctttccttctgaatagtagtattctctgctagaaaactactagtgatggttattactgagtatgaatttaagaactgaggttatgattggtaatacaatccaaaaagaagggtctgaacaccaaaattctttatacatatttaagtaactgtattattattatacagatgtctttacctttttgactttatagatcactgcagcattaagaaagtttccagtttaccattccataagtacaattaatccttctagtgtaaatgttcaaatactgttataattatctaggcaattaataatttacaaactgatatttttgcacgattgtagtggtgtatagtcttgacttgcagagcattttgcttgagtccttgaaatgtcgtgttcattcattatttgctgagtgcttacaatgtattaggcactgttctaaatattaagtgtactaaataaacaaaaatccttgtattctgaaaaaaaaaaaaaaaaaaaaaaaaaaaaaaaaaaa

SEQ ID NO: 933 - protein, 426 aa, Homo Sapiens
MDCRTKANPDRTFDLVLKVKCHASENEDPVVLWKFPEDFGDQEILQSVPKFCFPFDVERVSQNQVGQHFTFVLTDIESKQRFGFCRLTSGGTICLCILSYLPWFEVYYKLLNTLADYLAKELENDLNETLRSLYNHPVPKANTPVNLSVNQEIFIACEQVLKDQPALVPHSYFIAPDVTGLPTIPESRNLTEYFVAVDVNNMLQLYASMLHERRIVIISSKLSTLTACIHGSAALLYPMYWQHIYIPVLPPHLLDYCCAPMPYLIGIHSSLIERVKNKSLEDVVMLNVDTNTLESPFSDLNNLPSDVVSALKNKLKKQSTATGDGVARAFLRAQAALFGSYRDALRYKPGEPITFCEESFVKHRSSVMKQFLETAINLQLFKQFIDGRLAKLNAGRGFSDVFEEEITSGGFCGGKDKLQYDYPFSQ

SEQ ID NO: 934 - DNA, 6814 bp, Homo Sapiens
aggaggaggaggaggaggagaaggaggtaggggcctgcgggtggctgggcggggcgcgctcgggcctccgctcttcacgcgccgcattcgtagcccgagagtccgcgccgcggggaggcttggaggcaagcgctgcccgcgagctgagccgccggaggaggagccgcgggcaacgaggtttctctgtcattcacagaaaaatgaatcatttaaacctttggaggactcagttatcacaatacttctctactaccaactaagatttatgatagtaaatttatgagagcaaatttccatgttatagaactgttgaagaactaaaagaggatattctttcatcaaaataattctgcagtatcataatattactaaataaaattaaaaagcacaattattaaattattaaatttgccacacatgtgcagcagctactgtatcctgatagtgaccaaacctcaaatataaatggtttcccttcatgggaaaagccattatatttggaagaaaccactgaacattgttattaaatatattttcagctaactgtcatttaggagaattttcatgaaacaagttctagaaagttccaagtcccaccagtaagtggatttgatattatggcagcaacttacagacttgtggttagtactgtgaaccactacagcagcgtggtgatagaccggcgttttgaacaagctatacattattgcactggaacctgccacaccttcacacatggaattgactgcattgtggtacaccatagtgtttgtgcagacctcttgcacatccctgtgtctcagttcaaagatgcagatctgaactctatgtttctaccccatgaaaatgggctttcttcggctgaaggagactatccccaacaggccttcacaggcatacccagggtcaagagaggatctacatttcagaatacctacaacttaaaggatattgcaggagaagcaatcagttttgccagtgggaaaataaaagaattttcctttgaaaaactcaaaaactctaaccatgcagcttacagaaagggaaggaaagttaagtctgactcatttaataggaggtcagttgatttggacttgctttgtggccattataacaacgatgggaacgccccatcctttggtttactgcggagttcctcagttgaggaaaaacctttgtctcatagaaactcactggatacgaacctgacttccatgtttcttcaaaacttttctgaagaagacttggttactcagattttggaaaaacataaaatagataatttttcttctgggacagacataaagatgtgcttggacatcttattgaaatgctccgaggatttaaaaaaatgcacagacatcataaaacaatgcataaagaaaaaatcagggagtagcatcagtgaaggaagtggtaatgatacaatttctagctctgaaactgtctatatgaatgtaatgaccaggttagcatcctatctgaaaaagttaccatttgaattcatgcagtctgggaataatgaggctctagatttaacagaactgatcagtaatatgcctagcttacaactgactcccttctccccagtgtttggcactgaacaaccccctaaatatgaagatgttgtccagctctcagcttctgactctggacgatttcaaactattgaattgcaaaatgacaagcctaattctaggaagatggacactgtacaatccattccaaacaactccacaaattccttatataacttagaggtaaatgatcctagaactctaaaagctgtccaggtccaatcacagtcattaaccatgaatcctttagaaaatgtttcttctgacgacttaatggaaactctttatattgaagaagagtcagatggaaagaaagcattagataaaggacaaaagacagagaatggacctagtcatgagttattaaaggtaaatgaacatagagcagaatttccagaacatgctactcatcttaaaaaatgccccaccccaatgcaaaatgaaattggtaagatatttgagaaatcatttgttaatctacctaaggaagactgtaaatcaaaagtttctaaatttgaagagggagaccagagagattttacaaattccagtagccaggaagagatagataaattgttaatggatttggaatctttttcacagaagatggagacctctctaagagagccacttgcgaagggtaaaaactctaattttttaaatagtcacagtcagttgaccggtcagacccttgtagatcttgagcctaaatctaaagtctcttcacccatagaaaaagtctcaccttcctgtctaacaaggattattgaaaccaatggacacaaaatagaggaagaggatcgagccctcttactgcgaatcctggaaagcattgaagactttgctcaagaactagttgaatgcaaatcaagcagagggagcctatcacaagaaaaggaaatgatgcaaattctacaggaaaccttgacaacttcctcccaggccaatttatcagtctgtagaagtcctgttggtgataaagccaaagatactacttcagcagttttgattcagcagactccagaggtgatcaagattcaaaataaaccagaaaagaaacctggaacaccactcccacctccagccacctctccaagtagtccccgacctctctccccggttccccatgtgaataatgttgtgaatgcgccattgtccataaacattccacggttctactttcctgaaggactcccagatacctgtagtaatcatgaacaaactctaagcagaattgaaactgctttcatggatattgaagaacagaaagcagacatttatgaaatggggaaaattgcaaaggtctgtggctgtcctctctattggaaagcccccatgttcagggctgcagggggagagaagacaggatttgtgacagcacagtcattcattgccatgtggagaaagttgctgaataaccatcatgatgatgcctctaaattcatctgtcttctagcaaagcccaactgcagctctctagaacaggaggatttcatccctctacttcaggatgtggtggatacccaccctggtctcacgttcctgaaagatgctccagaattccactcccgctacatcaccacggttattcagagaatattctacacagtcaacagatcttggagtggaaaaattacttcgacagagataagaaaaagcaactttttgcaaaccctagcacttttggaagaagaggaagatataaaccaaattacagattacttctcctatgaacatttctatgttatttattgtaaattctgggaactagatactgatcacgacctctacatcagccaggccgatctgtctcgatacaatgaccaggcttcatcaagcaggattattgaaaggatattctctggtgcagtaacaaggggaaaaacaatacagaaagagggaagaatgagctatgcagattttgtttggtttttgatctctgaagaagacaaaaggaatcctaccagcattgagtattggttccgctgcatggatgtggatggagacggtgtactctccatgtatgagctggagtacttctatgaggagcagtgtgaacggatggaagccatgggaattgagcccttgccattccatgatttactgtgccagatgcttgacctagtgaagccagctgttgatggcaaaataactctaagagatctgaagaggtgcagaatggctcacatcttctatgacactttctttaatctggagaaatacttagaccatgaacagagagatccctttgcggtccagaaggatgttgagaacgatgggcctgagccctcagactgggaccggtttgccgctgaggagtatgagacgcttgttgcagaggaatctgcccaagcacaattccaggaaggctttgaagattatgaaacagatgaacctgcctctccctctgaatttggaaacaaaagcaataaaatattaagtgcaagccttccagagaaatgtggaaagcttcaatcagtggatgaagaatagctgccggtgtctacaatgaaacgaagatgtgtattttaaatgtttctttcttgtgaagagatgttctcgtttgcatactgctttttaaagactttgatttctccaagtgtgtatcatctgcactaggaactttgtttttaagcaataggtctggatacacatttaacttaggaggctcctccaatttgcctcaaacctcttacggagcttctcctcagaagtggtaccatcgccttccaaagtcagcactctacactcttgaatgtaccaaggatctcttggcgacagtaccaagcacggttctctacacaggtgactgaagttgcctctgtgttggctggcatccctgagtcccctccgggctcctatggagcctagaagaaaccttcacttgcagaaaacttgagtcagaaaattctggaacttgaaaaagtagtaagggcctccagaattgacttagccctagtaataaaagcactgccaaaacatctcagagacttcttttatgtatactggagttcaaagatctttaacttacctggcttaatgtaatttcacagttacctgccaaactactagtcactttacatcctcaggtattgtaaccactgggccttccaactttgctggcaagctctggtaacctccctgactgtggatcttatataaaatctcaagataaaaaaacacttcttaaatgaagtatagaatttgactcatacttggaaaaagcccttttaacttttatcttttattcattgaactattgaatgatgtatttaatatccaaattagttgataactgttttcacttcctatcagaaggcctgcttgaagacataaaggaataatgatacattaaaattcttactagatagatatattccttcctcccaggagtattagactagctaatagtaaaggcctcaacgttattctttacttcatgttgaaaacaattactacagatatttcatccacctcagtatttatcaaggaaatggaaaatgatacagctataaaagaaagctgttatttactgtagttgtagatgtattcactacagaatcctacatttttcagcaggccacagtccagccaaatcctataatatccttgaaaagaaactattaaaaaggatagacatttctgatgtaagtaaaacccccaagcaacttaatatccatctgtcagtcatcaacttttcccctagattttttttttaactagttctgaaagtgtcaagaatagcttccctttccaccctacctaggttccctccttgctggcataaaggccaagcagtgaaatgaaccttgggttagagttatggtaggcaaaaagaaaaggagaatttaggaaataaatatgctataaacaaggtacagtacagtgagagttaacaatcctaggaatcctgcctgtcacaagctcccagttccctgtcattttatcttcatgattagaactgatcttccatttaactattacagaaagcagtaactattgcaactatctaatagttcacacaaaagaattaaaagcttaaaaataatttttaggaaacacaatattcaaaatctaaacacactgataaattattaagattaagattatttatgtgataaatgaaatctcctaccaatccatccagcctttaccagggaagaaaagcaattatttcatttcagatagaaatacaaaaaaaaaaaaaatacttttcttagaagccagatatggtttaaatgttttattatccataatgatctaaactaataagattcaccaaaaagtaaaaattcaattttacaatatacatttttttttttaactatttggctttacctttttaccttggttctccttactgaagtcctcttgctttcactttgatctggtttttgaagtctcttaattattggctgggcatggtgactcatgcctgtaatcccggcactttgggaggccaagggaggtgatcacttgagcccaggagtaaagaccagcctgggcaacatagtgagactccgtctctacaaaaaataaatttagctgggcatggtggtgcacatctgtagtcctaccaacttgggaggctgaggcaggagaatcgcttgagccccaggcttcgaggctgcagtgagctatgattacgacactgcactccagcctaggcgacagagcaagaccccattctcttacaaagtctctattataaaagtacatccatcaataccattccatttaaaatgggctattgtaatttacccacattatcacattttcaggaattataagaatgtgttttattgtactccttccttggagctgaatgcaaggaatgtgaattctgaggaattaaggtagaatatatttgactttctggtaaagatcatggttaagtataatcattactgccaaactggaattttcaagttattataatatcccaggccccttgataaaagctgagggttatcatgaccttaatgctaattcaatgagaaatgagtttaatagcataacattaccaaggtaatcaaactaataaaattccatatatcttccctgcatcttgtcactgtgtaccattcaaagtgtttataaaactctagattcatcaaatgagatttgctcagctttttgaaatgttaagatgtgtttggagaaggctgcatgactttgtttttcccttttagcaaaactaaataaagttgtcaaatatgaatcatgttcattaaggt

SEQ ID NO: 935 - protein, 1150 aa, Homo Sapiens
MAATYRLVVSTVNHYSSVVIDRRFEQAIHYCTGTCHTFTHGIDCIVVHHSVCADLLHIPVSQFKDADLNSMFLPHENGLSSAEGDYPQQAFTGIPRVKRGSTFQNTYNLKDIAGEAISFASGKIKEFSFEKLKNSNHAAYRKGRKVKSDSFNRRSVDLDLLCGHYNNDGNAPSFGLLRSSSVEEKPLSHRNSLDTNLTSMFLQNFSEEDLVTQILEKHKIDNFSSGTDIKMCLDILLKCSEDLKKCTDIIKQCIKKKSGSSISEGSGNDTISSSETVYMNVMTRLASYLKKLPFEFMQSGNNEALDLTELISNMPSLQLTPFSPVFGTEQPPKYEDVVQLSASDSGRFQTIELQNDKPNSRKMDTVQSIPNNSTNSLYNLEVNDPRTLKAVQVQSQSLTMNPLENVSSDDLMETLYIEEESDGKKALDKGQKTENGPSHELLKVNEHRAEFPEHATHLKKCPTPMQNEIGKIFEKSFVNLPKEDCKSKVSKFEEGDQRDFTNSSSQEEIDKLLMDLESFSQKMETSLREPLAKGKNSNFLNSHSQLTGQTLVDLEPKSKVSSPIEKVSPSCLTRIIETNGHKIEEEDRALLLRILESIEDFAQELVECKSSRGSLSQEKEMMQILQETLTTSSQANLSVCRSPVGDKAKDTTSAVLIQQTPEVIKIQNKPEKKPGTPLPPPATSPSSPRPLSPVPHVNNVVNAPLSINIPRFYFPEGLPDTCSNHEQTLSRIETAFMDIEEQKADIYEMGKIAKVCGCPLYWKAPMFRAAGGEKTGFVTAQSFIAMWRKLLNNHHDDASKFICLLAKPNCSSLEQEDFIPLLQDVVDTHPGLTFLKDAPEFHSRYITTVIQRIFYTVNRSWSGKITSTEIRKSNFLQTLALLEEEEDINQITDYFSYEHFYVIYCKFWELDTDHDLYISQADLSRYNDQASSSRIIERIFSGAVTRGKTIQKEGRMSYADFVWFLISEEDKRNPTSIEYWFRCMDVDGDGVLSMYELEYFYEEQCERMEAMGIEPLPFHDLLCQMLDLVKPAVDGKITLRDLKRCRMAHIFYDTFFNLEKYLDHEQRDPFAVQKDVENDGPEPSDWDRFAAEEYETLVAEESAQAQFQEGFEDYETDEPASPSEFGNKSNKILSASLPEKCGKLQSVDEE

SEQ ID NO: 936 - DNA, 1665 bp, Homo Sapiens
ccggaggagtcacgtagctctgcgacatccgcagcctcatttaccagagggagccagggctgcagcctcatctgtttgcggatcagaacccgagctgtgcttgtggctgcggctgctaactggctgcgcacagggagctgtcaccatgcctcactcgtacccagccctttctgctgagcagaagaaggagttgtctgacattgccctgcggattgtagccccgggcaaaggcattctggctgcggatgagtctgtaggcagcatggccaagcggctgagccaaattggggtggaaaacacagaggagaaccgccggctgtaccgccaggtcctgttcagtgctgatgaccgtgtgaaaaagtgcattggaggcgtcattttcttccatgagaccctctaccagaaagatgataatggtgttcccttcgtccgaaccatccaggataagggcatcgtcgtgggcatcaaggttgacaagggtgtggtgcctctagctgggactgatggagaaaccaccactcaagggctggatgggctctcagaacgctgtgcccaatacaagaaggatggtgctgactttgccaagtggcgctgtgtgctgaaaatcagtgagcgtacaccctctgcacttgccattctggagaacgccaacgtgctggcccgttatgccagtatctgccagcagaatggcattgtgcctattgtggaacctgaaatattgcctgatggagaccacgacctcaaacgttgtcagtatgttacagagaaggtcttggctgctgtgtacaaggccctgagtgaccatcatgtatacctggaggggaccctgctcaagcccaacatggtgaccccgggccatgcctgtcccatcaagtataccccagaggagattgccatggcaactgtcactgccctgcgtcgcactgtgcccccagctgtcccaggagtgaccttcctgtctgggggtcagagcgaagaagaggcatcattcaacctcaatgccatcaaccgctgcccccttccccgaccctgggcgcttaccttctcctatgggcgtgccctgcaagcctctgcactcaatgcctggcgagggcaacgggacaatgctggggctgccactgaggagttcatcaagcgggctgaggtgaatgggcttgcagcccagggcaagtatgaaggcagtggagaagatggtggagcagcagcacagtcactctacattgccaaccatgcctactgagtatccactccataccacagcccttggcccagccatctgcacccacttttgcttgtagtcatggccagggccaaatagctatgcagagcagagatgccttcacctggcaccaacttgtcttcctttctctcttcccttcccctctctcattgctgcacctgggaccataggatgggaggatagggagcccctcatgactgagggcagaagaaattgctagaagtcagaacaggatggctgggtctccccctacctcttccagctcccacaattttcccatgatgaggtagcttctccctgggctctccttcttgcctgccctgtctcctgggatcagagggtagtacagaagccctgactcatgccttgagtacataccatacagcaaataaatggtagcaaaacattctaaaaaaaaaaaaaaa

SEQ ID NO: 937 - protein, 364 aa, Homo Sapiens
MPHSYPALSAEQKKELSDIALRIVAPGKGILAADESVGSMAKRLSQIGVENTEENRRLYRQVLFSADDRVKKCIGGVIFFHETLYQKDDNGVPFVRTIQDKGIVVGIKVDKGVVPLAGTDGETTTQGLDGLSERCAQYKKDGADFAKWRCVLKISERTPSALAILENANVLARYASICQQNGIVPIVEPEILPDGDHDLKRCQYVTEKVLAAVYKALSDHHVYLEGTLLKPNMVTPGHACPIKYTPEEIAMATVTALRRTVPPAVPGVTFLSGGQSEEEASFNLNAINRCPLPRPWALTFSYGRALQASALNAWRGQRDNAGAATEEFIKRAEVNGLAAQGKYEGSGEDGGAAAQSLYIANHAY

SEQ ID NO: 938 - DNA, 4057 bp, Homo Sapiens
ccccgcctccgcccccggctggcgtgagctgggtgtttcctgcctctctcagtccgggtttggagactcctgcgtcctccgacttttcatggaagagatgtcaggagaaagtgtggtgagctcagcggtgccagcggctgctacccgcaccacttccttcaagggcacgagccccagctccaaatacgtgaagctgaatgtgggtggagccctctactataccaccatgcagacgctgaccaagcaggacaccatgctgaaggccatgttcagcgggcgcatggaagtgctcaccgacagtgaaggctggatcctcattgaccgctgtgggaagcactttggtacgatactcaactaccttcgagacggggcggtgcctttacccgagagccgccgggagatcgaggagctgctagcagaagccaagtactacctagtccaaggcctggtggaagagtgccaggcggccctacaaaacaaagatacttatgagcctttctgcaaggtccctgtgatcacctcatccaaggaagaacaaaaacttatagcgacttcaaataagccagccgtgaagttgctctacaacagaagtaacaacaaatactcatataccagcaattctgacgacaatatgttgaaaaacattgaactgtttgataagctgtctctgcgctttaacggaagggtcctgttcataaaggatgttattggggatgaaatctgctgctggtccttttatggtcagggccggaagattgctgaagtctgttgtacctccatcgtctatgccactgagaagaaacagaccaaggtggagtttcccgaagcccggatttatgaggagaccctgaacattttgctgtatgaggcccaggatggccggggacctgacaatgcgctcctggaggccacaggcggggcggcggggcgctcccaccacctggacgaggacgaggagcgggagcggatcgagcgcgtgcggaggatccacatcaagcgccctgatgaccgggcccacctccaccagtgagcaggcaagagaccgagccgccctcctctcaccgcccccactccctgccgtgctacacccagatcctgtgcaggctgccgggccccttctgcttcccttggagcctggagatacttttgtaacaagccagatgattattttggtattgcttgacaaggcaaattgattgtcttgacccaggcgtatgacccctgtcgttgaacaagctgtgtctaagatctctacttttcatgagaatctgagactctttggagccaggctttctcggttctcagaggaaaagtatgaatgagtgtgaagtgtatgtgagaacttttgtttgcaatatttatttttgtgggtgtcgacttcctatgtgggctttttgggtgacactcccttaagggttcagtttgacaattctgagagttgtcctgcagttggaggccaccagaggtatctgagctccctgcttcctatttcataatcctccagccccagcaggtccactcctggttcctgtgtgtttggcccgggcacaatccccactgctttgctagacgtgctttctgccatgtggctttgggcctagagcttgttgataattgcagcttgtggcagtggaaatatggctgaatgagcgtctaaatcgttgagaccagtgcaactttgggtgcaaggctttgtttagggatcaagccttttgccaccttgggctggtctttggcctggtgctcactgggaccccatatgtctgcgtaggagcagaactttccatggcagtaagtgtccagctctgtttctggttctttccccaactccagccccgtccagttgttctcctgattgacccgactccactccaggaaggccatctgaccctgtgacaggcatagctcataaactacccctccctgggatcccgctcctcttcagcctccttccccatgaagctgggctaactttctaagtcattttgcttagaaattcagtgtggcccataccctttgtcctcccagcctggcatccaggcagggacaccctcacaccaccagccccagggagcttccctgctataaacacagacccccttgtctttgcctctgatttttacacagtgtagagtggccagcagtgaacaggttgaggatgtgcgggtagatagataactttgggtctggtttgtgtctgtgttcatgtttgtttaagggatatgtgtgactgtgggtggggacgtgtgcttgtggggcacaggtggcggcccctgctggagcccggctgggcgcagcgcctatgtaggacgggtgttctcagtgacctacctcccaggctcctctgcacctgcaaaggaacaggagtgagtcgtgactgacaggggtggttgagactagactaggtagagtagttaccaggagatgtgaatgtgcgtcaggtgatggatgggtttgtcaagggaatcgttaccgttttataccaaaggtattaacatgggcagcctttgacacatgtattccaaaaacgagtttatattttcaaacggtttttacagcttagactttgtacttactgccctgcctgtgacagttgtatgccttcattttgtatccaacagcaaagtctacaataaaactttaaaacaatcatgactgaatgtcaaaatcgtgtattgggcagatgctttttaaactgtcgtgtgagaaacttttatattaggccatttggattttattaagtgctaaggaaagagggcttacaaaatgtttcgtaaatattttatactgtttaagtgttaaacaccaaccctgtctttcttttgggttgagcttttttagaaagtcgaagtgaatgttggccaggaaaatggaaaagccattgtataaatttttttttgaggcggagtcttgctctattggccaggctggagtgtagtggcaccatctccacttaccacaacttgtgcctcctgggttcaagcgattctgctgcctcagcctcccgagtagctgggattgcaggtacccatcagcccatgcccagctaattttgtatttttagtagagatggggtttcaccatgttggccaggctggtcttgaactcctgaccctgtgatccgaccaccttggcctcccaaagtgctgggattacaggtgtgagtcaccacacctggctgcatagtgttttaaatgtttgtgtgaagaatgagtttgtggaacaatttgatttgctgtggcctctatgcctaatgagctagtgtttctggcagctctctctacccaactttgcacttgtagttttgagtctttgtctctctggaatatgaacaggtttataaaacattccatggtgaacaattctgtcggctgcattatagccatgagtgaatagacagcattggctggtccaagctctgttattgagtatacaaggaactgatttttcttatgttagcactaagggcaaaaaccaatatttataatgtaagcactatccaggtaaaacactggcccaagatttggtaaagagatttcattgcaatgtaataactacagttttttacaaattggaacagctttggtgtgtcgtaatcaagggttttttttgtttgtttgtttcaaataagccatctgattgtggtgactggggcccatgtccaagacaattcctggcatattctgtcaccctcccgtggggcgatcactgtgtggggaccccattccccagttaaagtgtgtctctgtaccttacaacagcgattcaggacccaagtgtgaacaacactcagcccgccctctggagcgtgtgctgtctttagggccctacccaaagtcactgtaacagttaagtgtgtcattaacctttctgtctctttgcgccataaaaaaatgctcaaagttttagatgtagccactgtatgttgtacaaacgttggcgacatgtaaaataaaagtcataaaatgctaaaaaaaaaaaaaaaaaaaaaaaaaaaaaaaaaaaaaaaaaaaaaaaaaaaaaaaaaaaaaaaaaaaaaaaaaaaaaaaaaaaaaaa

SEQ ID NO: 939 - protein, 313 aa, Homo Sapiens
MEEMSGESVVSSAVPAAATRTTSFKGTSPSSKYVKLNVGGALYYTTMQTLTKQDTMLKAMFSGRMEVLTDSEGWILIDRCGKHFGTILNYLRDGAVPLPESRREIEELLAEAKYYLVQGLVEECQAALQNKDTYEPFCKVPVITSSKEEQKLIATSNKPAVKLLYNRSNNKYSYTSNSDDNMLKNIELFDKLSLRFNGRVLFIKDVIGDEICCWSFYGQGRKIAEVCCTSIVYATEKKQTKVEFPEARIYEETLNILLYEAQDGRGPDNALLEATGGAAGRSHHLDEDEERERIERVRRIHIKRPDDRAHLHQ

SEQ ID NO: 940 - DNA, 2228 bp, Homo Sapiens
agaaaaccacagggcgcggggccagggcggcggcccccagggagttggcaggatggcagagggcaaggcaggcggcgcggccggcctcttcgccaagcaggtgcagaagaagtttagcagggcccaggagaaggtgctgcagaaattggggaaagctgtagaaaccaaagatgaacgatttgaacaaagcgctagcaacttctaccaacaacaggcagaaggccacaagctgtacaaggacctgaagaacttccttagtgcagtcaaagtgatgcatgaaagttcaaaaagagtgtcagaaaccctgcaggagatctacagcagcgagtgggacggtcatgaggagctgaaggccatcgtatggaataatgatctcctttgggaagactacgaggagaaactggctgaccaggctgtaaggaccatggaaatctatgttgcccagttcagtgaaattaaggagagaattgccaagcggggtcggaaactcgtggactatgacagtgcccgacaccacctggaggcagtgcagaatgccaagaagaaagatgaggccaagactgccaaggcagaggaagagttcaacaaagcccagactgtgtttgaagatctgaaccaagaactactagaggagctgcctattctttataatagtcgtattggctgctatgtgaccatcttccaaaacatttccaacttgagggatgtcttctacagggaaatgagcaagctgaaccacaatctctacgaggtgatgagcaaactggagaagcaacattccaataaagtctttgtggtgaagggactgtcaagcagcagcaggcgctctttagtcatttctcccccagttcgaacagctacagtctccagtcctcttacctcacctactagtccctctacactttccttgaagagtgagagtgaatctgtctcagcaactgaagatctggcacctgatgcagcccaaggggaagacaattctgagatcaaggagctcttagaagaggaggaaatagagaaggaaggatctgaagcaagctcctctgaggaagatgagcctctaccagcctgcaatggccccgcccaggcccagccctctcctaccactgaaagggccaagtcccaggaggaagttctccccagctccacaactccatcaccaggcggagccctgagcccttcagggcagccttcatcatctgccacagaagtagtcctccgaacccgcaccgcaagtgaaggatctgaacaaccaaagaagagagcctctatccagaggacctcagcaccccctagtaggcctcctccacccagagccactgcaagccccaggccctcctcagggaacataccttccagccctacagcctctggagggggttcacccaccagccctagggcctccttggggactgggactgcaagtcctaggacctccctagaggtctctcctaatccagaaccaccagagaagccagtaagaactcctgaggccaaagaaaatgaaaacatccacaatcagaaccctgaagaactttgtacttcccccaccttaatgacatctcaggttgcttcagagcctggagaggcaaagaagatggaagacaaggaaaaggataataagcttatctcagctaactcctcggagggccaagaccagcttcaagtctccatggtaccagaaaacaacaacctcacagcacctgaacctcaagaagaggtatccacaagtgaaaatccacaactctgaagagaaactaccaagactcctcctgccccaaacctcgccagagaagctcttcaaccagagggtataggtcagagggatataagagccagcatccatccctgggttctcagtaggaatgctggtgctgtctaaagacctggcattaatggaggcggaggagcagccttacgggagggatggagggaggcaggctggggagaagagaacattagactcagggaatatttaattctggttttagcattattagaataagactttatacattaactaaagtggagctttaatcactataaaaagcaaaagtatctatagacacagacacttgcctatacagagacataaccacacacactcagaggatagtgaacaaatctgtctttgacttacgacccattttgcaagacttaaagccggaagaacacattttcagattgttaaataaagtctgattctgactaaaaaaaaaaaaaaaaaa

SEQ ID NO: 941 - protein, 565 aa, Homo Sapiens
MAEGKAGGAAGLFAKQVQKKFSRAQEKVLQKLGKAVETKDERFEQSASNFYQQQAEGHKLYKDLKNFLSAVKVMHESSKRVSETLQEIYSSEWDGHEELKAIVWNNDLLWEDYEEKLADQAVRTMEIYVAQFSEIKERIAKRGRKLVDYDSARHHLEAVQNAKKKDEAKTAKAEEEFNKAQTVFEDLNQELLEELPILYNSRIGCYVTIFQNISNLRDVFYREMSKLNHNLYEVMSKLEKQHSNKVFVVKGLSSSSRRSLVISPPVRTATVSSPLTSPTSPSTLSLKSESESVSATEDLAPDAAQGEDNSEIKELLEEEEIEKEGSEASSSEEDEPLPACNGPAQAQPSPTTERAKSQEEVLPSSTTPSPGGALSPSGQPSSSATEVVLRTRTASEGSEQPKKRASIQRTSAPPSRPPPPRATASPRPSSGNIPSSPTASGGGSPTSPRASLGTGTASPRTSLEVSPNPEPPEKPVRTPEAKENENIHNQNPEELCTSPTLMTSQVASEPGEAKKMEDKEKDNKLISANSSEGQDQLQVSMVPENNNLTAPEPQEEVSTSENPQL

SEQ ID NO: 942 - DNA, 2251 bp, Homo Sapiens
gacgtcacggtcactgacagcgtgagcccgcggcggctgctgccatggtggctggcggccgggtaagggtctgagtggatctcctgccaggccagagcgccttcgggggccgcggcggaaggccaggagtttgcagccagggcgccgggtttgtggtctgcagtgtcgtgaggctgaggtgcagcatgtctagactgggagccctgggtggtgcccgtgccgggctgggactgttgctgggtaccgccgccggccttggattcctgtgcctcctttacagccagcgatggaaacggacccagcgtcatggccgcagccagagcctgcccaactccctggactatacgcagacttcagatcccggacgccacgtgatgctcctgcgggctgtcccaggtggggctggagatgcctcagtgctgcccagccttccacgggaaggacaggagaaggtgctggaccgcctggactttgtgctgaccagccttgtggcgctgcggcgggaggtggaggagctgagaagcagcctgcgagggcttgcgggggagattgttggggaggtccgatgccacatggaagagaaccagagagtggctcggcggcgaaggtttccgtttgtccgggagaggagtgactccactggctccagctctgtctacttcacggcctcctcgggagccacgttcacagatgctgagagtgaagggggttacacaacagccaatgcggagtctgacaatgagcgggactctgacaaagaaagtgaggacggggaagatgaagtgagctgtgagactgtgaagatggggagaaaggattctcttgacttggaggaagaggcagcttcaggtgcctccagtgccctggaggctggaggttcctcaggcttggaggatgtgctgcccctcctgcagcaggccgacgagctgcacaggggtgatgagcaaggcaagcgggagggcttccagctgctgctcaacaacaagctggtgtatggaagccggcaggactttctctggcgcctggcccgagcctacagtgacatgtgtgagctcactgaggaggtgagcgagaagaagtcatatgccctagatggaaaagaagaagcagaggctgctctggagaagggggatgagagtgctgactgtcacctgtggtatgcggtgctttgtggtcagctggctgagcatgagagcatccagaggcgcatccagagtggctttagcttcaaggagcatgtggacaaagccattgctctccagccagaaaaccccatggctcactttcttcttggcaggtggtgctatcaggtctctcacctgagctggctagaaaaaaaaactgctacagccttgcttgaaagccctctcagtgccactgtggaagatgccctccagagcttcctaaaggctgaagaactacagccaggattttccaaagcaggaagggtatatatttccaagtgctacagagaactagggaaaaactctgaagctagatggtggatgaagttggccctggagctgccagatgtcacgaaggaggatttggctatccagaaggacctggaagaactggaagtcattttacgagactaaccacgtttcactggccttcatgacttgatgccactatttaaggtgggggggcggggaggcttttttccttagaccttgctgagatcaggaaaccacacaaatctgtctcctgggtctgactgctacccactaccactccccattagttaatttattctaacctctaacctaatctagaattggggcagtactcatggcttccgtttctgttgttctctcccttgagtaatctcttaaaaaaatcaagattcacacctgccccaggattacacatgggtagagcctgcaagacctgagaccttccaattgctggtgaggtggatgaacttcaaagctataggaacaaagcacataacttgtcactttaatctttttcactgactaataggactcagtacatatagtcttaagatcataccttacctaccaaggtaaaaagagggatcagagtggcccacagacattgctttcttatcacctatcatgtgaattctacctgtattccagggctggaccacttgataacttccagtgtcctggcagcttttggaatgacagcagtggtatggggtttatgatgctataaaacaatgtctgaaaagttgcctagaatatattttgttacaaacttgaaataaaccaaatttgatgtt

SEQ ID NO: 943 - protein, 470 aa, Homo Sapiens
MSRLGALGGARAGLGLLLGTAAGLGFLCLLYSQRWKRTQRHGRSQSLPNSLDYTQTSDPGRHVMLLRAVPGGAGDASVLPSLPREGQEKVLDRLDFVLTSLVALRREVEELRSSLRGLAGEIVGEVRCHMEENQRVARRRRFPFVRERSDSTGSSSVYFTASSGATFTDAESEGGYTTANAESDNERDSDKESEDGEDEVSCETVKMGRKDSLDLEEEAASGASSALEAGGSSGLEDVLPLLQQADELHRGDEQGKREGFQLLLNNKLVYGSRQDFLWRLARAYSDMCELTEEVSEKKSYALDGKEEAEAALEKGDESADCHLWYAVLCGQLAEHESIQRRIQSGFSFKEHVDKAIALQPENPMAHFLLGRWCYQVSHLSWLEKKTATALLESPLSATVEDALQSFLKAEELQPGFSKAGRVYISKCYRELGKNSEARWWMKLALELPDVTKEDLAIQKDLEELEVILRD

SEQ ID NO: 944 - DNA, 2416 bp, Homo Sapiens
ttgcagtgcttataactttattctgtgtaattcctatccacagtcacttctgttcatttttaatgaaaacctattgctgttattttctattatgagttaacggtgatgtgtgttttttaaattttgtatacttgctctcaccctaaaatataccttaagagacttttcccctgtttttctttctgctttccaagactccaggaaaaacagcttccatggcacattttgtacagggcacatctagaatgattgccgcagaaagttctacggagcataaagagtgtgctgaaccatcaacaagaaagaacttgatgaattctcttgaacaaaagataaggtgtttggaaaaacaaagaaaagagctcctggaagttaaccagcaatgggatcagcaatttagaagtatgaaagagttatatgaaagaaaggtagcagagctgaagacgaaactggacgccgcggaaagattcctcagcacgcgggagaaggatccgcatcagaggcagagaaaggacgacaggcagagagaggacgacaggcagcgcgacctgacccgggaccggctgcagcgggaggagaaggaaaaggaacgcctaaatgaagaattacatgaattgaaagaagagaataaacttttaaagggaaaaaatactcttgcgaacaaggaaaaggaacattacgaatgtgaaataaaacgcctcaataaggctcttcaggatgccttgaatatcaagtgttcattttccgaggactgtttgaggaagtctcgagtggaattctgccatgaggagatgagaacagaaatggaagttctgaagcagcaggtgcaaatatacgaagaagacttcaaaaaggaacgatcggatcgagagagacttaatcaagagaaagaggagctacagcaaattaatgaaacttcccaatcccagttgaacaggctgaattcccagataaaagcttgtcagatggagaaagaaaaactagaaaagcaattaaaacagatgtattgcccaccctgtaactgcggcttggttttccacctgcaagatccatgggtaccaacaggccctggagctgtgcagaagcaacgggagcacccaccagactatcagtggtatgctcttgaccagcttccgccagatgtacaacacaaggcaaatggtttatcctcagtaaagaaagtccatccgtagaagtacacactaacagagagagacaacaggcaacgagggagcgtggctgaggaccctcttctttgtttatactgaggcttgtttctgccacaaaggcacatcatctaccctgttatttgtgcctggtcatgttttcctttggtatgaatacaggaaaaggcttctgacagctaagatcctgatcaaattggaggagccagttattatacaaccaaatacaacttccagtttccttgaaatgagacttggcagatggatgatgcacgactccctgaaaatctcttcagcatattgctgttggatgcacaaaaatgattctatgatttaggcaactcagtgtttgctgcagggatattgtatgttgatttaaagtgcatatgtgtgtgtgtgtgtgtgtgtgtgtgtgtgtgtgtgtgtttcctggggtaaaaatttctgcagttgtaaacgtttaacattgctcccattcttcttccacagggccttagttctttagctatttgactacatattgttgacctcagtgatcctaaacgtagaattgaagaggtgtatatacctcattaaattaaataagtggttcaatctgaataagatggttaattggaagctattccttagacagatcatttctttaagatgatgagaaattgtgcgcctgcatcacaagacttgattatgaaagataaagtcttgggctgggtgcagtggctcatgcctataatcccagcactttgggaggctgaggcaggtggattgctttgaggccaggagttctagaccagcctggccagcatggtgaaaccccatctctactataaatacaaaaattagccaggctcgtggcacacacctataaacccagctactcaggaggcttgaggcgggaggatcacttgagcccagggaggcagaggttgctgtaagttgagatcgccactgcactccagcctgggaaatagagtgagcaagactcagtgccccctacccacccactccacaccaccaaaaaaaaaaaaaaaaaaaaaaggaagacaaagtcctgatgggatgatgatggctatatggctatgctgtgtccatatatacttacagaaatatttcagacatatggatttatagttaaatctgtgtttttccttcccttggatttgattaattttaatgaaaaacttaattctgacttctcaagccaattaaaatgaaaatggaatttattgaaa

SEQ ID NO: 945 - protein, 325 aa, Homo Sapiens
MAHFVQGTSRMIAAESSTEHKECAEPSTRKNLMNSLEQKIRCLEKQRKELLEVNQQWDQQFRSMKELYERKVAELKTKLDAAERFLSTREKDPHQRQRKDDRQREDDRQRDLTRDRLQREEKEKERLNEELHELKEENKLLKGKNTLANKEKEHYECEIKRLNKALQDALNIKCSFSEDCLRKSRVEFCHEEMRTEMEVLKQQVQIYEEDFKKERSDRERLNQEKEELQQINETSQSQLNRLNSQIKACQMEKEKLEKQLKQMYCPPCNCGLVFHLQDPWVPTGPGAVQKQREHPPDYQWYALDQLPPDVQHKANGLSSVKKVHP

SEQ ID NO: 946 - DNA, 8312 bp, Homo Sapiens
ggagggctggttaccatggaatccaccatctgttcactccccaccggaatgtgattatccttgctgggctgggaagtggggaaagcaggggagcctgtgctgggtgagattatctgcaatggaccgggttaatgggaggcttgctttggctcgctggaagaacaaatgaagggagttttacttcaaccatttgtgacttctggccaagaggaataaattcagcttttataaggcagcagtacctgtccaaagatcgctttagttccaccttgctccacaagcagcacaaccacactggttggtgagaatgtatctgaagaagaggctcagggaataaatgggaacaggccagcaaaacactcagctgcaagtccaaagccacaagtgcctccaaagccattacacctgcagaattcaccttcgtccaatatacaccaaacccccaggcataaagctttacctagtgcaaaaccaaggatggaggaaattaaacctgcctctgcttcttgtgtctcaaaagaaaaacccagtaaggtatcagatctcatcagtcgctttgaaggaggcagctcattatcaaattatagtgatttgaagaaagagtctgctgtgaacctaaatgctcctagaaccccaggaaggcatggattgacaaccacacctcaacaaaaactcctctcccagcacttgccacagaggcagggaaatgatacagataagactcagggtgcacagacttgtgtggccaacggtgtaatggcagcacaaaaccagatggaatgtgaggaggagaaagctgccactcttagctcagatacttctattcaagcttctgaacccttgcttgatacgcacatagtgaatggagaaagagatgaaactgccacagctcctgcatcacccacaacagacagctgtgatggaaatgcttctgacagtagctacaggactccaggcataggcccagtgctccccctagaagaaagaggggcagaaacagaaaccaaggtacaagagagggaaaatggggaaagccctctggaactggagcagctggaccagcaccatgagatgaaggagactaatgagcaaaaacttcacaaaatagccaatgaacttttgcttactgaaagagcttatgtcaaccgacttgacctcttagatcaggtattttattgcaaactgttggaagaagcaaaccgaggctcgtttccagcagagatggtgaataaaatcttttctaatatttcatcaataaatgccttccatagtaaattcctcttgccagagctggagaaacgaatgcaagaatgggaaactactcctagaattggagacatccttcagaaattggcaccattccttaagatgtatggagaatatgtgaaaggatttgataatgcaatggaattggttaaaaacatgacagaacgtattccccagttcaaatcagtggttgaagaaattcagaaacagaaaatctgtgggagcttaactttgcagcatcacatgctagaacctgttcagcggattccccggtatgagatgctccttaaggactatctaaggaaattgcctcctgattccctggactggaatgatgctaaaaaatcacttgaaattatatctacagcagcaagccattctaatagtgcaataaggaaaatggagaacctaaagaaactcttagagatttatgaaatgttgggagaagaagaagacattgtaaacccttcaaatgaactaataaaagaaggacagatcctcaaactagctgctcggaacacttcagcacaagaacgctaccttttcttattcaacaacatgttgctgtactgtgtgcccaaattcagcttggtaggctctaaattcacagttcgaaccagggttggcattgatggaatgaaaattgtagagactcaaaatgaagaatatccacatactttccaggtgtctgggaaagagagaacactggaactgcaggccagttctgcgcaagacaaagaagaatggatcaaggcccttcaagaaaccatcgatgcttttcatcaaaggcatgaaaccttcagaaatgcaattgcaaaggataatgacattcactcagaggtttctactgctgagctagggaaaagagccccaagatggatccgagataatgaagtgacaatgtgtatgaaatgtaaagaacctttcaatgcactgacacgaaggaggcatcattgtcgagcatgtggatatgtggtttgttggaaatgctccgactacaaagctcaacttgaatatgatggtggtaaattgagcaaagtttgtaaagactgttatcaaatcataagtggattcacagacagtgaagaaaagaaaagaaaaggaattttagagattgaatcagcagaagtatctggaaacagtgtggtgtgcagctttcttcagtatatggagaagtcaaaaccttggcagaaagcttggtgtgtgatccccaagcaagaccctcttgtgctgtacatgtatggtgccccccaggacgtcagagcccaggccaccattccacttctgggctatgtggtggatgaaatgccaaggagcgcagacctgccacacagtttcaaactgacccagtctaagtccgtgcacagctttgctgcagacagtgaggaactgaagcagaagtggctgaaagtcatccttttagctgtcacaggtgagacaccaggtggtccaaatgagcatccagccaccttggatgatcatcctgaacctaagaaaaaatcagaatgctgaactcctccaggaccagccatggtgtggaggtctcaggacttacagctcaagacattcccagctcttcttacacatctgctagcactttatgttgaaaaatataggcccataaatgcatcttttgaggactattttcctatgtttatgtactcttagtgaaattagtgtgcagagtcattctaccgataaagttttgaaataatgtgaaaactggagcattttttgagctattccttgaatatgtgcttttttgtcttgaagaaatggtgtatcaattgattctgtcaccgtcaggttagaatgagcacttccatttaagaaatcctttcatgtcttcttctctttcacatgtaggacctggaacagtttgaaagatatacctccatgttgccaaaatagatccatggtgaaaaatacagggacagttgaggctattgtattaacttatttaatttagtttataaatctctagctgcataaatgatgtctgttcttttaaaacaaaagaaaaaggacaaattgttggtgttcagatttccgatttataaagaaaagataacttgtttttgtagaaatactcctaagaatgtcttaagtatatagcaattatgtatatatagtattaaatatatatattatacatgcttttaggttcacattcatctctaatttattttttaaatataaagcatggtttatcgtggaattgagcaatgttctaaactgaagaaatgttttggtgatttatgttttgctgattggcatttgagggtattgatatttttataataagcggtaatttatgtggcatgggatatatttgtgaattccaacagtacttttaaagtaccattttttgtttctgtgcctatttaaaacagtgcctctcttagaaggtgctattaatataagatgagggttcagttaatgcttcagtcttgattattctaagattaaagtgcattttggtcactgggacagtcaaagtcatacaggttattttaccgtttacaatcctataattattgcagtagttaacatcagcatgtacaaacattttcaccaaaacccaaactttatgagacacctgaccttttacagaactaggatatgtggaaaccacatttatcgtaatgtttttcttttccgtaagataatcgagcatggttaaataaggtctctatataatgaacacttaagataactgtatgggccttttcctttgtcggaatgaaacaaaatccacatgtgataacctatgtttggggtgggggctggtcacatgattccttgtcatgaaggctgctcttcactcttttgtacttgtgattaaaatctcacactaagtttactatttaacttaatcctttttctcaaattaaacctttttttatactgtcataccccaaacattgtcactttttaatgtaccagtctgctagaaatctacaagaatgatcccactatctttagtatgtaaggattacaccttagatatagaatagaatttgagactgccacacatttattcaggccttgttactttaagaaatatcttattttttccaccccaaaggagcaagtgaaccaattattgctgacataataggttcccttcctccataaaaggattatcagccatgatcattaacattaaaccaaatagatggagccaaaaagagataaaagtagcttcttaggccctattaaatcagggaaagactagaagaaaatttacattgcttctcttttttaatggccagcggggtatgtgtgtgatgtatactcagagtggttttttggaaaattaaactgtagctatagatgatgctttggttttcttaatctcaagaaaagagaagcaatggaaatacagaatgattaactggggaagaggacttttgtaagtgtgactagaacaatggtaatgtatgggccaatgggaagatttataagtcagattatttttgaaaactatttttaaaagcaagaagactacactttccctaccaaaacagaagtaacatggacacacttaagttttggctcaataaatatcaatgttatttaacttagatcattgaaagaatactcatgtaaagataatgtttattatcatgctcttaacagtcattatctttaattttttaaatgagaagcattaatactagaagagaatttctggttatccggtcaccatattcactttccaccccacattcttcagctaaacgcaaagagaagcagtgaaacagccttacccgcttctctcttattaaagaatcactgatgtttttactcaatgaaaggtaaagtaatacccttagccatttattaaacaattcaaccaagagacctcaaagtgtgattgatgataagaataatcaatgccttttcccttccaacatacttgagcagtcatgacaacctaaaaatatcattggttgctttcccattaaaaccaacgttccctgtgggtcttaattctttattttcactcatttggtgctttccaagtcatcttttctttaaagtgcccttcctccaaactttaaaaagtacttccttgacaaaatttctattcattataaaacatttcaatattttaagcttaaattttgcttttgctgaaagcctaccatttggcgtgttaagtatgaaatatagtgcagacttttatcttggttttaagtggggctcaataaaaaacaccagccacttttgtaataatggcatcacagtgtcatcatgtatgcaagcaataaaactctttagggtatggttttatactgaaaatttaatatgaaggccccttcccacaagaatatagataattattaactttctagatgtgatacggtaattcgaattgcagagtataaggaagggaaatgggaaggggcatcattccttggattttaaataactatcaagaacatttttactttaacaaagaaaatggatagaaaaagcacattttgttttccctgaagtttaatttgacatcaggtttgtgtacttatcttcactaggtgacttaacttaccccaatttttttaaaaattattaaactttttacagaaactaaccttttaaatgtaccctttccccatatatatatacgcacacgtttggattttttttttttaagaacacttgttctagttataaatatataaagaaaacgataaagtttgtggtactgcagggttgttaaagattctttgatgccttctaaaaacttttgtcaaaaatacttttgagttcacaattctgttttacttttccttgtccttactttttggaaacagggtggttgcttttatttgttttctggttatattcaaagccttaagttcttaatctgagcatattgtctgtgataaatttctgatgatctttctggactagatacaacctgagtagcaagcaccaaccggagcaagtaaacttctagggaacaagcgtcttgggttttataggtatctttgctataatgcagaatagattaatgaagatttcctatatcatatgatatttgtgttagtgggtctaagattaagcacatgatatttataagctaaaattaactcaaaagtcaagaatgtcttaatgttttcattcttaaattttgtattctccaagaatgtattagtatatgaactgtggccaaccagttcctattcttcagactgtattgacatctgtagtggatcatgttgcttcttcattcttaccaattttattagaatcaaacttcttgttatttgcatactattatctactatagattctcagctttagaaaatgactatgatacataaagaccactaggtcaacttaaaaaaccctttctgtgaatttatacatgtatgtatatatgtaaaaacactgttgatttgcaattctgtctttccatagaaatgaactttttctatcgaaattgtttaacttaaatattttaacataaattatttacatggatctttatgtataattcatccttatatataccccttaatcacgtagtcatgagaagataactttgctttctttacagaaagggcagagaggaataagataagaaactgaaacaagcaagaatgaagagagatgtgggggagagactgctggtctccagaccacagcaatgtgttttaagataagatgaaatattttaactgcagaagggatataaaatctatgtaattacatgctgatgggatccattgcacccaggtttttgaccttggcctgtaaatgctagactatgatatcttgttattctttttctcctttgggcttttaaaaaataatttcattctcagatcattttctgtactgtttactgaggcaaaaaaaaaaaaaatctgaagtcaatcatggtcttctactttctggactgagcatttggcagaatgcagtatcttttcctgtattttgacatgaaatagcacatggcttctacaagatagttttaacttgttggggtcaccgggagttatatgatggtcaaccccttttcccaaaattcattgtggtagttttagtggaaaacgtaaatcaagaaatctcatatcatactttaataaataaataccaaatacatagtgacatataggtttgggaagaaactagtctgtggggaccattataagagaatcacattatatattacacagtatatggatattggaatgtatcacttgtggggggttctcttcattagcaaaacagtcatgtctgtctgtatataagacttttttttttttaaccaaactagcatttcattttgtgagtgacaattgacattttaaaataagcataggccgggcatagtggctcatgcctgtaatcccagcccttgggaggccgaggtgggcagatcacttcaggtcaggagtttgagaccagcctggccaacatggtgaaaccctgtctctactaaataaaaataaaacaaaataagtgtatctgggccaggcacggtagcccatgcctgtaatcccagcactttgggaggccgaggagttcgagaccagcctggccaacatggcaaaaccctgtctctacaaaaattagccaggtgtggtggcacatgcctgtaatcccagctactcgggaggttgaggcaggagaattgcttgaacccgggagacagaggttgcagtgagccgagattgcaccactgcactccggcctgggtgacagagcaagacttcgactcaaaaaataaaataagcgtatctggatttttcttttgaattcttgactgataagtttgagaatgtatgtttttggaattttacagttgactcaagtgtgaaagtatacacaagtaatttttcttttctagctatgtgaatgtaaaatacttgcagataatgtatatattgtgtaatatatgtatatttggtcataaaagcagataattggaaacattgtaaaattaagcactttaattcctattaaatattaaacatttgtatcttgtaaataaacacatccttaaattaaaaaaaaaaaaaaaaaaa

SEQ ID NO: 947 - protein, 766 aa, Homo Sapiens
MEEIKPASASCVSKEKPSKVSDLISRFEGGSSLSNYSDLKKESAVNLNAPRTPGRHGLTTTPQQKLLSQHLPQRQGNDTDKTQGAQTCVANGVMAAQNQMECEEEKAATLSSDTSIQASEPLLDTHIVNGERDETATAPASPTTDSCDGNASDSSYRTPGIGPVLPLEERGAETETKVQERENGESPLELEQLDQHHEMKETNEQKLHKIANELLLTERAYVNRLDLLDQVFYCKLLEEANRGSFPAEMVNKIFSNISSINAFHSKFLLPELEKRMQEWETTPRIGDILQKLAPFLKMYGEYVKGFDNAMELVKNMTERIPQFKSVVEEIQKQKICGSLTLQHHMLEPVQRIPRYEMLLKDYLRKLPPDSLDWNDAKKSLEIISTAASHSNSAIRKMENLKKLLEIYEMLGEEEDIVNPSNELIKEGQILKLAARNTSAQERYLFLFNNMLLYCVPKFSLVGSKFTVRTRVGIDGMKIVETQNEEYPHTFQVSGKERTLELQASSAQDKEEWIKALQETIDAFHQRHETFRNAIAKDNDIHSEVSTAELGKRAPRWIRDNEVTMCMKCKEPFNALTRRRHHCRACGYVVCWKCSDYKAQLEYDGGKLSKVCKDCYQIISGFTDSEEKKRKGILEIESAEVSGNSVVCSFLQYMEKSKPWQKAWCVIPKQDPLVLYMYGAPQDVRAQATIPLLGYVVDEMPRSADLPHSFKLTQSKSVHSFAADSEELKQKWLKVILLAVTGETPGGPNEHPATLDDHPEPKKKSEC

SEQ ID NO: 948 - DNA, 1516 bp, Homo Sapiens
gctgcagcggggcaggcgcgtggccgggccgcggcgcgatgagtggggcccgggcggcgcccggggccgcgggcaacggcgcggtccgggggctgcgggtggacgggctgcccccgctgccaaagagcttgagcgggctgctgcactcggcgtcgggcggcggcgcgtctgggggctggcggcacctggagcggctgtacgcgcagaagtcgcgcatccaggacgagctgagccgcgggggcccgggcggcggcggggcccgggcggcagcgctgcccgccaagcctcccaacctggacgccgctctggcgctgctccgcaaagagatggttggtctccgccagctggacatgtccttgctctgccaactgtacagcctctacgagtcgattcaggagtacaagggggcatgccaggcagcctccagcccagactgcacttacgctctggagaacggcttcttcgatgaagaggaggaatatttccaggagcagaactccctgcacgacaggagggaccgaggccctcctcgggacttgtcactgcctgtctcctccctctccagcagcgactggattctggagtccatctagagggtcttgggagggatgtgactgttgggaagcccttcctactggacacgctgtcatcatttgctgcttctcttgcaagaaagcacctccgttgtggacggtcctcgggcacaggggatgagcgctaccagtttcatttgtaggcagggagttctccgcggatgcatggtggcagtctgctttgatggcagcagtttctgcttaggtgacctagaggtcctcagcagtatcctccacacctatttattgaggtgcacctgctggggattcataatgagaatataacaagaggatctcggtgaaaggccttagtgggtgttttgtgtgaggtggcttgtagctagctacttccttacagatggtagagtattccaatcctctttgtgttagggttcttgcttccagtttgggatgtattaaaaccaccatttcactgcttcccttcctcaatatgctctgcagcttttcttgctgtttaaacctctcgcctcagctttatttatttgtaagctgcattactaactgcccagtgattcggtgaaagctttttactgaaaaagttaacatttctagtcatcccaatcaactggcttttttcaaccaaaattttatatcattctttgtctatcagatacgagaggaaggaagataatacgaagacatgttgaatagtgaaaaaaaaaaaaagaacacaaaaactggggcaagccaatgtgatgtatcactcactgtaagatggcaaatgttttcatttttaagattccgaatgtaaactagtgtgctagaaagcaaaccacccgccactcaaaccagtaattaccttaagccttaatatatttattaaaatactttatgagaacattacactttgtaggttaaaaatgaggataaaatgctaaactatcaaaaaaaaaaaaaaaaaa

SEQ ID NO: 949 - protein, 184 aa, Homo Sapiens
MSGARAAPGAAGNGAVRGLRVDGLPPLPKSLSGLLHSASGGGASGGWRHLERLYAQKSRIQDELSRGGPGGGGARAAALPAKPPNLDAALALLRKEMVGLRQLDMSLLCQLYSLYESIQEYKGACQAASSPDCTYALENGFFDEEEEYFQEQNSLHDRRDRGPPRDLSLPVSSLSSSDWILESI

SEQ ID NO: 950 - DNA, 2591 bp, Homo Sapiens
gctgagcgcgggcgcggggccgctacgtgcgcggggagcgcggggagcgcggggagcgcggggctgcgctcgtgtgcgctcctgggcgctcgccgccgccgctgccgccgcgcgcctttgagtcagcaaactccgcggcccgcaagcccggctcggcccggccctgctctgttctgcccggaggagccgcccattgatcgtgtcctgtgctgaagatgtttccggaacaacagaaagaggaatttgtaagtgtctgggttcgagatcctaggattcagaaggaggacttctggcattcttacattgactatgagatatgtattcatactaatagcatgtgttttacaatgaaaacatcctgtgtacgaagaagatatagagaattcgtgtggctgaggcagagactccaaagtaatgcgttgctggtacaactgccagaacttccatctaaaaacctgtttttcaacatgaacaatcgccagcacgtggatcagcgtcgccagggtctggaagatttcctcagaaaagtcctacagaatgcacttttgctttcagatagcagccttcacctcttcttacagagccatctgaattcagaagacattgaggcgtgtgtttctgggcagactaagtactctgtggaagaagcaattcacaagtttgccttaatgaatagacgtttccctgaagaagatgaagaaggaaaaaaagaaaatgatatagattatgattcagaaagttcatcctctgggcttggacacagtagtgatgacagcagttcacatggatgtaaagtaaatacagctccgcaggaatcctgaaaaataattctaatgttactatcttaggaatagcaaattatgtccagtcatagagaagaaagcttcataataatacattcttacctaaagctcactgtcatgatgttaggtatttaaattcttaaagatgttgggttgtttattagtggtatttttatgttgtcttattttaggtaagcttctgtgtaaagctaaaaatcctgtgaatacaatactatcctttacaggcagacattattggtaaacaagatcttgccctccaatgaaatgacttacatgttttaaaaaaccgagttggttttattgaatttaaaaagataggtaactaagtagcatttaaaatcaagatagagcattccttcttgtatcagtggggcagtgttaccataaacacggtgtatatgttgttaaaccctatgaagagtaacagtgtagaccagactgcctctctcagatatgtgcctgatattttgtggatacctcccctgcactggcaaaacactatgcttttgggtgttagactgaaatattttaagagtatttaacctttccagtattctgtttcacgcttagatggaaatgtatcttatgaatagagacatattaaaataatgtttacatcttagaaaaaacatagatagtgctagtaatattacttataactgtaatatatagattcagaaatacattttcattatccaaaatcagcttcaacaaatggtttctggagacaaataatttgttttcattatcattgtataatcaggttaatgatttattttttgactaaatgtgcaatttcttatcactagataactttcagtatcagtggtggttacttattacttaaatcagaggaaggattttataaagattaataaatttaattttaccaataaatattcccataatttagaaaaggatgtcgacttgctaatttcagaaataattattcatttttaaaaagccccttttaaagcatctacttgaagattggtataattttcataaaatgtctttttttttagtgtcccaaagatatcttagataaactattttgaagttcagatttcagatgaggcaacattttcttgagataattacccaagtttcatccatgttgaatggtacaaaatatttctgtgaaactaacaggaagatattttcagataactaggataacttgttgctttgttacccagcctaattgaagagtggcagaggctactacaaaaagcaaccttttcattttcactaagagtttaaaagctattgtattattaaaaagtctttacaatgcttgtttcaaagaaccaacagaaaaaaaagctaagaaaactgagaactaacattaaaaaaattaaatttagaataagaatgatttctttaatttgtcctttttttctttggtctaaaacattattaaatttttgtaaatattttgatttaatgtgtcttagatcctcattattttaatacaggaaaagaaaagatttagtaatttcttaccatgctaatatgtaaagttcatgccatccaggcatttaagagcgatcctcatcccttcagcaatatgtatttgagttcacactatttctgttttacagcagttttgaaaaacacatactatgccaccaattgtcatattatttttagatgatgtaacatagccatcaaaattaatattatgtaatgcctaatacttagtatgtaaatgtcacgagatcatttttacattaaacgtgaaaaaaaatcaaaaaaaaaaaaaaa

SEQ ID NO: 951 - protein, 201 aa, Homo Sapiens
MFPEQQKEEFVSVWVRDPRIQKEDFWHSYIDYEICIHTNSMCFTMKTSCVRRRYREFVWLRQRLQSNALLVQLPELPSKNLFFNMNNRQHVDQRRQGLEDFLRKVLQNALLLSDSSLHLFLQSHLNSEDIEACVSGQTKYSVEEAIHKFALMNRRFPEEDEEGKKENDIDYDSESSSSGLGHSSDDSSSHGCKVNTAPQES

SEQ ID NO: 952 - DNA, 2559 bp, Homo Sapiens
tttttttaagagacagggtcttgctatattgcccaggctagtttttacatctttaaagctgaatacttagctgggtgtggtggtgcacatgcctgtggtcctagctgttcaaaaggttaaggcaggaagattatttgagcctaggagttctgggctctagtgcactatgctgactgggtgtccacattaagttcagcatcagtgtagtaaactccaaggagctgggagccaccaggttacccagggaggggtgaactagcccaggttagaaatggagcaggtcaaaactcccatgctgatcagtagtgggatcatacctgtgaatagtctctgcactccagcgtggacaacatagtgagacctcatcactttaagaaaaacaaaccctgaatattttaagttagagatggagttagaaatacttttagttatagcagaatcatgtcaatttttagtacatcttttacttagctttttgcacacttttttttttttgagacggagtctcgccctgtcccctaggctggagtgcagtggcacagtcttggctcgccgcaacctccgtctcccaggttcaagcaattctcctgcctcggcctcctgagtagctgggactataggcacccaccaccatgcacagctaatttttgtatttttagtagagacagggtttcactatgttggccaggctggtctcgacctcctgacctcgtgatctgcctgccttggcctcccaaagtgctgggattacaggcgtgagccaccatgcccagcccctgcactaattttttaaacaaagtcctgttggtgctcccttcaaaatttatctccagtctgaccattttaccacttctgcaacaacccttctgactcagccactgttctgtttggtttgggttacatagtggcatcctacctggtcttcctgtttccactcttataccactagaccatattctccataaaccaccagagtgatcttttaaaataaaagcataaattatgttcaaaaccctccagtggcatccatctcatgtaaataaccactccttcctacaagatgccacctcacctgccccgactgcctcatcatagttccctctgcacaatgcccactttgccacagctgtgtgctcctgctggctcttggatgagcccaccagtcacacttctgcctgagggccttgcacatgctctggttgctgcctgagatacttatccccatcactatgatcaccttcccagagaggcatttcctggcctccctatttcctcaccaccatcatttctgtctgctgactctactttgtctgttggttgatttttgcactaagcgtactaccagaagctttcctctcaatttgctttcccacagtaaaagagcagggcctttgccttgtccattagtttctcctcagaacagtgcctcccaggtgttcaacaaatacttgctaaataaaagatggctgatagcaaaaatatttatgtctatgtatagggacttagtttttattgacattgtgcttttattccctagagaccctgaaatatggcgtctggcctgcttgaaagtttggggcagaagctgtattaaacttgttccgtacacgtcctggagagagatgtttttagaacggcctcgtgttcggtttgatggcgtgtatatcagtaaaaccacatatattcgtcaaggggaacagtctcttgatggtttctatagagcctggcaccaagtggaatattacaggtacaactgtagtacactgagtgagtggaaaattctctctctccatgtattagttaaatggacatctgttctttgttgcttttgattgacccgcaaaatggccctcagtatttttatctagtactcaatgtaggaattgcactaaaaaaaaaaataggctaatataaattacagaatttcttctggcctcttttagatttcttcttgtcttttgccctgggtgtatttacttgccttttcaaatagcttgtgcttttattccaccttattgcttgccaaatattattgtcatttagaaaaaaatagacatgttaaccgttgtgtgtggctctcactttgtttgaaattgttgctttgggaaaaacacagaactttaataaaacaatatttgacttttattcagtgagtaaaacttaaaagttcaacagtttcccctgaggaagataaaatatctttggttctttgttgctggactaacaggtagtcagtaatatttgttttaatgttttagcagttctttagcccgtggtatttcagtgttggtttcatagctatgaataggcataggtactaatagataaggacatattttatactttgtgtggggggtgtgttttggtcttccttttcttattacataggtacataagattctttcctgatggccatgtgatgatgttgacaacccctgaagagcctcagtccattgttccacgtttaagaactaggaataccaggactgatgcaattctactgggtcactatcgcttgtcacaagacacagacaatcagaccaaagtatttgctgtaat

SEQ ID NO: 953 - DNA, 4694 bp, Homo Sapiens
agaagaggcgggggcttcctgcttcagcctccttgggcagaagcagtgaccacaggcccccatggcaggcagggcgggtgggaggagggtgatttacaaggcagatgggcctctggctacagctcagtcctgcactcagccagggccaccccaggggctataagagcaactagatttctggagcagctcggggatgggtgccatttgagcccagcttggctccccctcctggctggcctccttcctgcccttctgcctgcctgtgtctgctgagattctgcaaagaggaacgcttggcaccatgtctctgctcaaccctgtcctgctgccccccaaggtgaaggcctatctgagccaaggggagcgcttcatcaaatgggatgatgaaactacagttgcctctccagttatcctccgtgtggatcctaagggctactacttatactggacgtatcaaagtaaggagatggagtttctggatatcaccagcatccgggatactcgctttgggaagtttgccaagatgcccaagagccagaagctccgggacgtcttcaacatggactttcctgataacagtttcctgctgaagacactcacggtggtgtccggcccggacatggtggacctcaccttccacaacttcgtctcctacaaggagaacgtgggcaaggcctgggctgaggacgtactggccctagtcaaacatccgctgacggccaacgcctcccgcagcaccttcctggacaagatccttgtgaagctcaagatgcagctcaactctgaagggaagattccggtgaagaactttttccagatgtttcctgctgaccgcaagcgggtggaagctgctctcagtgcctgccacctccccaaaggcaaaaatgacgccatcaatcctgaggacttcccagaacctgtctacaagagtttcctcatgagcctctgtcctcggccagaaatagatgagatcttcacttcttaccatgctaaggccaaaccctacatgacgaaggagcacctgaccaaattcatcaaccagaaacagcgggactcccggcttaactccctgctgttcccgccagcacggcctgaccaggtgcagggcctcatcgacaagtatgagcccagtggcatcaatgcacagaggggccagctgtcacctgaaggcatggtctggtttctctgtgggccagagaacagcgtgctggcccaggacaagctgctgctccaccacgacatgacgcagccactcaatcattacttcatcaactcgtcccacaacacctacctgacagccggccagttctcaggcctctcctcggctgagatgtaccgccaggtgctgctctctggctgccgttgcgtggagctagactgctggaaggggaaaccccctgacgaggagcccattatcacccatggcttcaccatgaccacagacatcttcttcaaagaagcaattgaggctattgcagaaagcgcctttaagacctccccctatcccatcatcctgtcgtttgagaaccatgtggactcaccccgccagcaggctaagatggctgagtattgccggacgatctttggggatatgctgctcacagagcccctggaaaagttcccactaaaaccaggtgtccccctgcccagccctgaggatctcaggggcaagatcctcatcaagaacaagaagaaccagttttctggccccacctcctccagtaaggatactggtggggaggctgagggcagcagcccacccagtgcccctgcaggtgagggcacagtgtgggctggcgaggaagggactgagctggaggaggaggaggtggaagaggaagaggaggaggagtcaggaaacctggatgaagaagagattaagaagatgcagtcggatgagggcacagcgggcctggaagtgacggcttatgaggagatgtccagcctagtcaattacatccagcccaccaagttcgtctcctttgagttctctgcccaaaagaaccgaagttatgtcatctcgtccttcacagagctcaaggcatatgacctgctctccaaggcctcggtgcagtttgtggactacaacaagcgccagatgagccgcatttaccccaagggaacccgcatggactcctccaactacatgccccagatgttctggaatgctggatgccagatggttgccctcaacttccagacgatggacttgcccatgcagcagaacatggcagtatttgagttcaacgggcagagcggctacctcctcaagcatgagttcatgcgccggccggacaagcagttcaaccccttctcagtggaccgcatcgacgtggtggtggccaccaccctttccattacggtgatctctgggcagttcctgtcagaacgcagcgtgcgcacctatgtagaagtggagctgtttggccttcctggggaccccaagaggcgctatcgaactaagctgtcacccagtactaactccatcaatcctgtctggaaggaggagccctttgtctttgagaagatcttgatgcctgagctggcctccctcagagtggctgtgatggaggaaggcaacaagtttcttggacaccgcatcatccccatcaatgccctaaattctgggtaccaccacctgtgcctgcacagtgagagcaacatgcccctcaccatgcctgcgctcttcatcttcctggagatgaaggactacatacctggtgcttgggcagatctcactgtggccctcgccaaccccattaagttcttcagtgcccatgacacgaagtctgtgaagctcaaggaggccatgggaggtctgcctgagaagcccttcccactggcgagtccagttgccagccaggtcaatggggcgttggccccaacgagcaatgggtcaccagcagccagggccggggccagggaagaggctatgaaagaagctgcggagccgcggaccgccagcctggaggagctccgggagctaaagggcgtggtgaagctgcagcggcggcacgagaaggagctgcgagagttggagcggcgcggagcgcggcgctgggaggagctgctgcagcggggcgcggcgcagctggcggagctcgggccaccgggcgtggggggcgtcggggcctgcaagctcggtcccggcaagggctctcgcaagaagaggagcctgccccgcgaggagagcgccggagccgcgccgggcgagggccctgagggcgtggacgggcgcgtgcgggagctgaaagacaggctggagctggagctgctgcggcagggcgaggagcagtacgagtgcgttctgaagcgcaaggagcagcacgtggccgagcaaatctccaaaatgatggagctggccagagagaaacaggcggcagagctgaaggccctgaaggagacgtcggagaacgacaccaaagagatgaagaaaaagctggagacaaagagactggagcggatccagggcatgaccaaagtcaccacagacaagatggcccaggagaggttgaagagagagattaacaactcccacatccaggaagtagtgcaggtgatcaagcagatgacggagaacttggagaggcaccaggagaagctggaggagaagcaggcggcttgcctggaacagatacgggagatggaaaagcagttccagaaggaggcgctggcagagtacgaggccaggatgaagggtctggaggcagaggtgaaggagtcggtgagggcctgcctcaggacctgctttccctccgaggccaaggacaagcctgagagggcctgcgagtgccccccagagctgtgtgagcaggacccactcatagcaaaggcagatgcccaggagagccgcctctgatgcccccatcccactgggacatttagcaaggaggttcagccccttctctgggatgtggttctattcccccaggaaaaaggagccccagccttctgaggctgtgggaacctgtggctgccttggacgctgcagccccctcctcaacggccaggccagagtctgagacaggacccaggcaccctcacggcagggcctctctggggcctagaagtcttctcaagctgacttcctacctccccctccatctctagataagtgtcatatatttgttgagggcaaaagactatggactggaaggcagaaagtgggatcctggccccactctgcctttcctattgagcaaccagctctgggctcagtttcctcacctggagggttggacccactcacctccactctagccccgaaccctcctgccccaggcttccaggccccatcaggcctgccctgagttggccttgtccactccttgaggcagatcctggcactacctcacagctccctggggacggccactccctggctgagggccctcccctcccctctgcctgtccggaacgggaggctgaaatggaaaagctgccttggccctgcttggctgagtcacaaggggcagtgggctcttgggtgctgttccaccctgaccctggctcacccctcttcctaggcctgggggcaggcagttcctaccatgtacccctctcaggctgcctgcctgacaaggtcagcatcatttgctctcctgaatttatgaggtttatttatttttctctttcctactcctattaaagaacctcgtcccagtgtttcctgcttaaaaaaaaaaaaaaaaaaa

SEQ ID NO: 954 - protein, 1185 aa, Homo Sapiens
MSLLNPVLLPPKVKAYLSQGERFIKWDDETTVASPVILRVDPKGYYLYWTYQSKEMEFLDITSIRDTRFGKFAKMPKSQKLRDVFNMDFPDNSFLLKTLTVVSGPDMVDLTFHNFVSYKENVGKAWAEDVLALVKHPLTANASRSTFLDKILVKLKMQLNSEGKIPVKNFFQMFPADRKRVEAALSACHLPKGKNDAINPEDFPEPVYKSFLMSLCPRPEIDEIFTSYHAKAKPYMTKEHLTKFINQKQRDSRLNSLLFPPARPDQVQGLIDKYEPSGINAQRGQLSPEGMVWFLCGPENSVLAQDKLLLHHDMTQPLNHYFINSSHNTYLTAGQFSGLSSAEMYRQVLLSGCRCVELDCWKGKPPDEEPIITHGFTMTTDIFFKEAIEAIAESAFKTSPYPIILSFENHVDSPRQQAKMAEYCRTIFGDMLLTEPLEKFPLKPGVPLPSPEDLRGKILIKNKKNQFSGPTSSSKDTGGEAEGSSPPSAPAGEGTVWAGEEGTELEEEEVEEEEEEESGNLDEEEIKKMQSDEGTAGLEVTAYEEMSSLVNYIQPTKFVSFEFSAQKNRSYVISSFTELKAYDLLSKASVQFVDYNKRQMSRIYPKGTRMDSSNYMPQMFWNAGCQMVALNFQTMDLPMQQNMAVFEFNGQSGYLLKHEFMRRPDKQFNPFSVDRIDVVVATTLSITVISGQFLSERSVRTYVEVELFGLPGDPKRRYRTKLSPSTNSINPVWKEEPFVFEKILMPELASLRVAVMEEGNKFLGHRIIPINALNSGYHHLCLHSESNMPLTMPALFIFLEMKDYIPGAWADLTVALANPIKFFSAHDTKSVKLKEAMGGLPEKPFPLASPVASQVNGALAPTSNGSPAARAGAREEAMKEAAEPRTASLEELRELKGVVKLQRRHEKELRELERRGARRWEELLQRGAAQLAELGPPGVGGVGACKLGPGKGSRKKRSLPREESAGAAPGEGPEGVDGRVRELKDRLELELLRQGEEQYECVLKRKEQHVAEQISKMMELAREKQAAELKALKETSENDTKEMKKKLETKRLERIQGMTKVTTDKMAQERLKREINNSHIQEVVQVIKQMTENLERHQEKLEEKQAACLEQIREMEKQFQKEALAEYEARMKGLEAEVKESVRACLRTCFPSEAKDKPERACECPPELCEQDPLIAKADAQESRL

SEQ ID NO: 955 - DNA, 2037 bp, Homo Sapiens
agaccgcctcttccttcccgttgtttaaggcagttggttgccctcctgtccgtcagaggtgcagtaccagaggtggcgtgctgccgatttcgcgtttgccttgctggatgattccgcttgtttgccggctgcgtgagtgcttagagcttttcggtggaagatgccggacagtaacttcgcagagcgcagcgaggagcaggtgtctggtgctaaagtcatcgctcaggccctgaaaacgcaagatgtggagtacatatttggcatcgtaggcatcccagtgaccgaaatcgccattgctgcccagcagctaggcatcaagtacatcgggatgaggaatgagcaagcggcttgttatgctgcctccgcgattggatatctgacaagcaggccaggagtctgccttgttgtttctggcccaggtctcatccatgccttgggcggtatggcaaatgcaaacatgaactgctggcccttgcttgtgattggtggttcctctgaaagaaaccaagaaacaatgggagctttccaggagtttcctcaggttgaagcttgtagattatataccaagttctctgcccgcccaagcagcatagaagctattccttttgttattgaaaaggcagtgagaagcagtatctatggtcgtccaggtgcttgctatgttgacataccagcagattttgtgaaccttcaggtgaatgtgaattctataaagtacatggaacgctgcatgtcacctcctattagcatggcagaaacctctgctgtgtgcacggcggcttctgttattaggaatgccaaacaaccccttcttatcatcgggaaaggtgctgcttacgctcatgcagaagagagtatcaagaaattggtggagcaatataaactgccatttttgcccacccctatggggaagggtgttgtccctgacaaccatccatactgtgtaggtgcagccagatccagggctttgcaatttgctgatgtaattgtgttatttggtgccagactaaattggattttacattttggactgcctccaagatatcagccagatgtgaagtttatccaggttgatatctgtgcagaagaattggggaataatgtaaagcccgctgttactttgctaggaaacatacatgctgtcactaagcagcttttagaggaacttgataaaacaccatggcagtatcctccagagagcaagtggtggaaaactctgagagaaaaaatgaagagcaatgaagctgcatccaaggaactagcttctaaaaaatccctgcctatgaattattacacagtattctaccatgttcaagaacaactacctagagactgtttcgtggtaagtgaaggagcaaatactatggacattggacggactgtgcttcagaactaccttcctcgtcacaggcttgatgctggtactttcggaacaatgggagttggtttgggatttgctattgcagctgccgtggtggctaaagatagaagccctgggcaatggatcatctgtgtggaaggagacagtgcatttgggttttctggcatggaggtagaaaccatctgcaggtacaacttgccaatcatactgttggtagtgaataacaatggaatttaccaaggttttgatacagatacttggaaagaaatgttaaaatttcaagatgctactgcagtggtccctccaatgtgtttgctgccaaattcacattatgagcaagtcatgactgcatttggaggcaaagggtattttgtacaaacaccagaagaactccaaaaatccctgaggcagagcctagcagacacaactaaaccttctcttatcaacatcatgattgagccacaagccacacggaaggcccaggattttcattggctgacccgctctaatatgtaaataaagacgccagttggtggtcttgagttttctctttcttgcaagatgaaattttattttccacagcaaaattactctactgttaaaattgtgcaaaataaaataaacatttaaaatgacattttacagtaaaaaaaaaa

SEQ ID NO: 956 - protein, 578 aa, Homo Sapiens [sequence omitted]

SEQ ID NO: 957 - DNA, 7169 bp, Homo Sapiens
cacggtgcctgcacgggacgccgctcgatccccgagccccctcgccgtccccgacagcccccccggcgccatgcaatcccggcttctactcctcggggcacccggaggccacggcggcccggcctcgcggcgcatgcggctgctcctgcggcaggtggtgcagcgcaggccgggtggcgacaggcagcggccggaggtcagactgttgcacgccggctcgggggccgacacaggtgatacagttaatattggagatgtatcctacaagttgaaaattcctaagaatccagaacttgtgccacagaactacatttcagactctctggctcaatctgtagttcagcatctaagatggataatgcagaaggatcttttggggcaagatgtttttctaataggacctcctgggcctcttcgacgctctattgctatgcagtacttggagctgaccaaacgggaggtcgaatacattgccctgtcaagggacaccactgaaactgatctcaaacagcgacgagagatccgtgcaggcacagccttttacattgatcagtgtgcagttcgtgcagccacagaaggcagaactctcattttggaaggtttggaaaaggcagagaggaatgttttgcctgttttgaacaacttgctggaaaacagagagatgcagcttgaagatggacgcttcctgatgtctgctgagcgttacgacaaacttctccgagatcataccaaaaaagagttggattcttggaaaattgtccgagttagtgaaaatttccgagtgattgccttgggcttgccagtgccaaggtattctgggaatccattagacccccctcttcgttctcgatttcaagccagggatatttattatttacccttcaaggaccaacttaagttgttatattcaattggagccaatgtttctgctgagaaagtttctcagctcttgtcctttgccacaactctgtgttcccaagaatcttctactcttggacttccagactttcctttagatagtttagcagctgcggttcaaatcttggattcctttcctatgatgccaatcaaacatgcaatccagtggctttatccatatagtattttactaggtcatgaagggaagatggctgtggaaggtgttttaaagcgctttgaacttcaagattcaggaagctctctacttcctaaagagattgtaaaagtagagaagatgatggaaaaccatgtgtcccaagcttctgtgaccatccggattgcagataaagaggtgaccattaaggtgccagccgggaccaggctattaagtcaaccttgtgcgtcagaccgtttcatacagactttgagccataagcagctacaggctgaaatgatgcagtctcacatggttaaagatatatgtttaattggaggaaagggttgtggaaaaacagtgatcgctaagaactttgccgataccttaggatacaacatagaacctattatgctctatcaggatatgacagcgcgtgatctgctacagcagagatacacccttccaaatggagacactgcctggcggtcctcaccccttgtgaatgctgctctggaaggcaagctggtcctgctggatggcattcaccgggtgaatgcgggcacgcttgctgtattgcaaaggttaatccatgatcgagagctaagcctctatgatggttctaggctgctgagagaagacaggtatatgcgtttaaaggaggagctgcaactgtctgatgaacagctacagaagagatccatttttcctatccatccctccttcagaatcattgccttggcagaaccccctgttattggaagcacagcacaccagtggctgggaccagaattcttaaccatgttctttttccattacatgaaaccacttgtgaaaagtgaagaaatccaagtgattaaggaaaaggtcccaaatgtacctcaggaagctctggataagttattatcatttacacacaaactcagagaaacacaggatccaacggcacaatcattagcggcatcactttctaccagacaactgttgcgaatttctcgtcggctgtcacagtatcctaatgaaaatcttcacagtgctgttactaaagcctgcctttccaggtttttacccagtcttgctaggtcagcattagaaaaaaatctggcagatgctacaatagaaataaatactgatgacaatttggagccagaactgaaggattacaaatgtgaagtaacatctggaactctgaggattggtgctgttagtgcaccgatctataatgcacatgagaaaatgaaagtgcctgatgttcttttctatgacaacattcagcatgtgatagtgatggaagatatgctgaaagactttctccttggagaacacttattattggttggcaaccagggtgtaggaaaaaacaagattgttgacagattccttcacctgctcaacagaccccgagaatatattcagctacacagggataccacagtacaaactcttacgcttcagccttcggttaaagacggacttattgtatatgaagactcacctttggttaaagcagtaaagttgggtcatattctggtagtagatgaggctgacaaagctccaacaaatgtcacgtgtattttaaaaactctagtagaaaatggagaaatgattctagcagatggaagacgcattgttgcaaattctgctaatgtgaatggaagagaaaatgttgtagtgattcatcctgattttaggatgattgttctggcaaatagacctggatttcctttcctaggcaatgatttcttcggtaccttaggtgatatttttagctgccatgcagttgataaccccaaaccccactcggagctcgagatgctcagacagtatggaccaaatgtgcctgagcccatccttcagaagcttgtggctgcctttggagagctgaggagtttggctgaccaagggattattaactatccttattctaccagagaagttgtcaacatagtcaaacatttacagaaatttccgactgaaggtctctccagtgtagttcgaaatgtgtttgactttgattcctacaacaatgacatgagggagatattgattaacactttacacaaatacgggatacctatcggagcaaagcctaccagtgtgcagctggcaaaggagttgactctgccagaacaaacgttcatgggctactggacaattggtcaggcaagaagtgggatgcaaaaactcttgtgtccagtggaaactcatcatatagacataaagggtccagcacttataaatatacaggagtatccaatagaaagacatgaagaaagatccctaaactttactgaagaatgtgcctcatggagaataccattggatgaaattaatataatctgtgacattgctacatcacatgaaaatgagcaaaatactctctatgtagttacatgcaatcccgcttccctgtactttatgaatatgactgggaaaagtggcttctttgtggacttttttgatatcttcccaagaacagccaatggcgtttggcacccttttgtgacagtggcaccgctgggaagtcctctcaaaggtcaagtggttctccatgagcagcagagtaatgttatcctgttgttagatactactggccgggcccttcatcgtctcatcctcccttccgagaagtttacatctaagaaacctttctggtggaacaaagaagaagctgaaacttataaaatgtgtaaagaattttcacacaaaaactggctggtgttctacaaagaaaaagggaacagcctgactgtgctggatgttctagaagggcgaactcacaccatctcacttcccatcaacctcaagacagttttccttgtagcagaggacaaatggcttctggtggagagcaaaacaaatcagaaatatcttttaactaagcctgcacacatcgaatctgagggtagtggggtttgccagttgtatgtgctgaaagaggagccgcccagcacagggtttggagttacacaagaaacagagttcagcatacctcataaaatttccagtgatcaactatcatctgaacatctaagttcagctgtggaacaaaagattgcctctcccaacagaattctctcagatgagaaaaattatgctacaatagttgttggttttccagatctcatgtcacccagtgaagtttattcttggaagagaccatcatctttgcataaacgaagtggcactgatacatcattctatagaggaaagaagaaaagggggactccaaaacaaagcaattgtgtgactcttttagatacgaatcaggtagtgaggattttacccccaggagaagtccctctaaaagatatctacccaaaagatgttactcctccacaaacatctggttatatagaagtcactgatcttcaatcaaagaaactccgatatatccctattcccagatcagaatctctctcgccgtataccacatggctgtcgaccatttcagacacagatgcactgctggctgagtgggacaaaagcggtgttgttactgttgatatgggaggtcacatcaggctttgggaaactggacttgaacgtctgcagcgatcactcatggaatggagaaacatgattggacaagatgacagaaatatgcagataacaatcaacagagacagtggtgaagatgtaagctcccccaaacacgggaaggaggacccagacaacatgcctcacgtgggcggcaacacttgggctggcggaacagggggaagagacacggcaggcctgggtggcaaaggaggcccttaccggctggatgcaggccatacggtgtaccaggtctctcaggctgagaaagatgcagttcccgaagaggtcaagagagctgctagagagatgggccagagagcattccagcagaggctaaaggagatccaaatgagtgaatacgatgctgcaacctatgaaaggttttcaggtgctgttcggcgacaggtgcactccctccgaatcatcctggataatttacaggctaaaggtaaagaaagacaatggctaagacatcaagctactggagaattagatgatgccaagatcattgatgggctgactggagaaaaagccatctacaaacgtcggggtgagctggagccacaacttggcagcccacaacagaaacccaagcgtctgcgcctggtggtagatgtgtctggtagcatgtaccgtttcaacaggatggatggccggcttgagcgcacaatggaggctgtgtgtatggtcatggaagccttcgagaactatgaggagaagttccagtatgacatcgttggacactctggagatggctacaacattggtctggttccaatgaacaaaatccccaaggacaataagcaaagactagaaattctgaagacaatgcatgcccactctcagttctgcatgagtggggaccacacgttagaagggacagaacatgccatcaaggaaattgtcaaagaagaagctgatgagtactttgtcatagtcttgagtgatgcaaatctgtcacgatatggaatacatcctgctaagtttgctcaaatcctcacaagagaccctcaagtaaatgcttttgccatttttattggctctttaggtgatcaagcaaccaggcttcagagaactttaccagctggtcggtctttcgttgccatggataccaaggatatccctcagattttacaacagatcttcacctccaccatgttgtcgagtgtctaagaagtgcccttcatcaccctgatgacaccaggatttgaaataagacaggaataaagagtattctgaaaaaaagaagatatggatgaagtgaacccatgcagtgactggatgattccggcattcctgggtcttcctacacttgctccgtaatgagaattcagagaagcagccagaaggagacttaaacatggaaagatactccactgatgagtttagaagtgattagggcaagctagttgacctgcactttatcaaaggttggggttaaaggaaggtggttttgagaactatgtgtttggtctatttccaaaaacctgagggggagaaaatactttgcttttgccttaacacatcatctggtcacgttagaaaagtgaccccatcaaactgagcctttgatgtcacattctgacacaagatgcaagtctgtgcaaaacccaccaaaatgctcctatccaacaattatttttattttctccctgctctgtattgaccagaaaacaatgattttataatatttaacccaccaaaaagtccctccaacagcaatatcttatgaaaggctggctgttctcaataatttcattttcttggccaaagccaaaaggaatcaaaaaatccttggagtgcttgcctttccacgtgacttttaaaaggctcttaaagagcaaatgtcctcttctccttgctgctagagtgggaggagaaagatgtcttgccttaaaagtttactgtttcttctgttcttctagcatctctcaaaaaattcacagtactccattttggggtccaaactgtaatgctcaaaataataaatgcttacacgaaaattatttattgagaatattcatataaaaattacctaaagcaaagtaaaaaaagtaaaatcaaggtggtatatttgaagtgaatggtgattggaaatttttagctgtaacaaaaagaaagaaaacaactttttttaaagcctcattctcttttctttcaaaatgtaccttattcccacacactcttgggctgacctttattttatcaataagctcaatattactttgtttaaaataagatgcttcagcaaaagtcattctctctttaaccatataatttaaaaactcctcttcacgattgatagcaaaatcagaaacgttagggcaccagtgagttgaaaaaactggtcttaagttggaaaaactattattaataatattatcctatccatccatatctattgaaattgtacaggtccataatttcattttaattaattataggaaagaagaaaagataatacccatttgttctatcacccctctccctatcattaactatcaaataaataaataaaagcaatctgatttccaacgtggtactaaaaaaaaaa

SEQ ID NO: 958 - protein, 1905 aa, Homo Sapiens
MQSRLLLLGAPGGHGGPASRRMRLLLRQVVQRRPGGDRQRPEVRLLHAGSGADTGDTVNIGDVSYKLKIPKNPELVPQNYISDSLAQSVVQHLRWIMQKDLLGQDVFLIGPPGPLRRSIAMQYLELTKREVEYIALSRDTTETDLKQRREIRAGTAFYIDQCAVRAATEGRTLILEGLEKAERNVLPVLNNLLENREMQLEDGRFLMSAERYDKLLRDHTKKELDSWKIVRVSENFRVIALGLPVPRYSGNPLDPPLRSRFQARDIYYLPFKDQLKLLYSIGANVSAEKVSQLLSFATTLCSQESSTLGLPDFPLDSLAAAVQILDSFPMMPIKHAIQWLYPYSILLGHEGKMAVEGVLKRFELQDSGSSLLPKEIVKVEKMMENHVSQASVTIRIADKEVTIKVPAGTRLLSQPCASDRFIQTLSHKQLQAEMMQSHMVKDICLIGGKGCGKTVIAKNFADTLGYNIEPIMLYQDMTARDLLQQRYTLPNGDTAWRSSPLVNAALEGKLVLLDGIHRVNAGTLAVLQRLIHDRELSLYDGSRLLREDRYMRLKEELQLSDEQLQKRSIFPIHPSFRIIALAEPPVIGSTAHQWLGPEFLTMFFFHYMKPLVKSEEIQVIKEKVPNVPQEALDKLLSFTHKLRETQDPTAQSLAASLSTRQLLRISRRLSQYPNENLHSAVTKACLSRFLPSLARSALEKNLADATIEINTDDNLEPELKDYKCEVTSGTLRIGAVSAPIYNAHEKMKVPDVLFYDNIQHVIVMEDMLKDFLLGEHLLLVGNQGVGKNKIVDRFLHLLNRPREYIQLHRDTTVQTLTLQPSVKDGLIVYEDSPLVKAVKLGHILVVDEADKAPTNVTCILKTLVENGEMILADGRRIVANSANVNGRENVVVIHPDFRMIVLANRPGFPFLGNDFFGTLGDIFSCHAVDNPKPHSELEMLRQYGPNVPEPILQKLVAAFGELRSLADQGIINYPYSTREVVNIVKHLQKFPTEGLSSVVRNVFDFDSYNNDMREILINTLHKYGIPIGAKPTSVQLAKELTLPEQTFMGYWTIGQARSGMQKLLCPVETHHIDIKGPALINIQEYPIERHEERSLNFTEECASWRIPLDEINIICDIATSHENEQNTLYVVTCNPASLYFMNMTGKSGFFVDFFDIFPRTANGVWHPFVTVAPLGSPLKGQVVLHEQQSNVILLLDTTGRALHRLILPSEKFTSKKPFWWNKEEAETYKMCKEFSHKNWLVFYKEKGNSLTVLDVLEGRTHTISLPINLKTVFLVAEDKWLLVESKTNQKYLLTKPAHIESEGSGVCQLYVLKEEPPSTGFGVTQETEFSIPHKISSDQLSSEHLSSAVEQKIASPNRILSDEKNYATIVVGFPDLMSPSEVYSWKRPSSLHKRSGTDTSFYRGKKKRGTPKQSNCVTLLDTNQVVRILPPGEVPLKDIYPKDVTPPQTSGYIEVTDLQSKKLRYIPIPRSESLSPYTTWLSTISDTDALLAEWDKSGVVTVDMGGHIRLWETGLERLQRSLMEWRNMIGQDDRNMQITINRDSGEDVSSPKHGKEDPDNMPHVGGNTWAGGTGGRDTAGLGGKGGPYRLDAGHTVYQVSQAEKDAVPEEVKRAAREMGQRAFQQRLKEIQMSEYDAATYERFSGAVRRQVHSLRIILDNLQAKGKERQWLRHQATGELDDAKIIDGLTGEKAIYKRRGELEPQLGSPQQKPKRLRLVVDVSGSMYRFNRMDGRLERTMEAVCMVMEAFENYEEKFQYDIVGHSGDGYNIGLVPMNKIPKDNKQRLEILKTMHAHSQFCMSGDHTLEGTEHAIKEIVKEEADEYFVIVLSDANLSRYGIHPAKFAQILTRDPQVNAFAIFIGSLGDQATRLQRTLPAGRSFVAMDTKDIPQILQQIFTSTMLSSV

SEQ ID NO: 959 - DNA, 1670 bp, Homo Sapiens
attgagagtggctctaacaagtgccatttttccttgttagctttcatttctcagccctttacaagattaaaatagtctgcagtttaatctctccaaagctttacggacagtgattctgtcctaaacaagacagtgactccaggatttctgaagactattgtggaagaagcatccattaaggccaagctataacatcagaaatggtgaatgaatacaagaaaattcttttgctgaaaggatttgagctcatggatgattatcattttacatcaattaagtccttactggcctatgatttaggactaactacaaaaatgcaagaggaatacaacagaattaagattacagatttgatggaaaaaaagttccaaggcgttgcctgtctagacaaactaatagaacttgccaaagatatgccatcacttaaaaaccttgttaacaatcttcgaaaagagaagtcaaaagttgctaagaaaattaaaacacaagaaaaagctccagtgaaaaaaataaaccaggaagaagtgggtcttgcggcacctgcacccaccgcaagaaacaaactgacatcggaagcaagagggaggattcctgtagctcagaaaagaaaaactccaaacaaagaaaagactgaagccaaaaggaataaggtgtcccaagagcagagtaagcccccaggtccctcaggagccagcacatctgcagctgtggatcatcccccactaccccagacctcatcatcaactccatccaacacttcgtttactccgaatcaggaaacccaggcccaacggcaggtggatgcaagaagaaatgttccccaaaacgacccagtgacagtggtggtactgaaagcaacagcgccatttaaatacgagtccccagaaaatgggaaaagcacaatgtttcatgctacagtggccagtaagactcaatatttccatgtgaaagtcttcgacatcaacttgaaagagaaatttgtaaggaagaaggtcattaccatatctgattactctgaatgtaaaggagtaatggaaataaaggaagcatcatctgtgtctgactttaatcaaaattttgaggtcccaaacagaattatcgaaatagcaaataaaactcccaagatcagtcaactttacaagcaagcatctggaacaatggtgtatgggttgtttatgttacaaaagaaaagcgtacacaagaagaacacaatttatgaaatacaggataatacaggatccatggatgtagtggggagtggaaaatggcacaatatcaagtgtgagaaaggagataaacttcgactcttctgccttcaactgagaacagttgaccgcaagctgaaactggtgtgtggaagtcacagcttcatcaaggtcatcaaggccaagaaaaacaaggaaggaccaatgaatgttaattgaaatatgaaagctgaaatgcaacaaacaacttccgcttaaaacaattaagttgttaataactgtgattttgtaaatttcagtaattcatttaaatgatgtttcagtagatatattctagcatattaagagcttttataactgagttatagattagtttgctttctggaataaaattttcttcttatactcttccttttttttagatattacattttgcttttatgacattcacgaggcaaaaaaccg

SEQ ID NO: 960 - protein, 407 aa, Homo Sapiens
MVNEYKKILLLKGFELMDDYHFTSIKSLLAYDLGLTTKMQEEYNRIKITDLMEKKFQGVACLDKLIELAKDMPSLKNLVNNLRKEKSKVAKKIKTQEKAPVKKINQEEVGLAAPAPTARNKLTSEARGRIPVAQKRKTPNKEKTEAKRNKVSQEQSKPPGPSGASTSAAVDHPPLPQTSSSTPSNTSFTPNQETQAQRQVDARRNVPQNDPVTVVVLKATAPFKYESPENGKSTMFHATVASKTQYFHVKVFDINLKEKFVRKKVITISDYSECKGVMEIKEASSVSDFNQNFEVPNRIIEIANKTPKISQLYKQASGTMVYGLFMLQKKSVHKKNTIYEIQDNTGSMDVVGSGKWHNIKCEKGDKLRLFCLQLRTVDRKLKLVCGSHSFIKVIKAKKNKEGPMNVN

SEQ ID NO: 961 - DNA, 3181 bp, Homo Sapiens
agtctgaagagaggcgggacgcggggtgataacagctggctctggtgggcgggcgggagctggggaggaggagcaggagaggcccacaggcttcatttggagtcaggcctggctgttgctcaggtgaccagcttgtgtctctgggagggcgctgctttccccggccacccggcgcgatgatccagaatgtcggaaatcacctgcgacggggcttggcctctgtgttctccaaccgcacatcccggaagtcagccttacgtgcggggaacgacagtgccatggcagacggcgagggataccggaaccccacggaggtgcagatgagccagctggtgctgccctgccacaccaaccaacgtggtgagctgagcgtcgggcagctgctcaagtggattgacaccacggcttgcctgtccgcggagaggcacgctggctgcccctgtgtcacagcttccatggatgacatctattttgagcacaccattagtgttggacaagtggtgaatatcaaggccaaggtgaaccgggccttcaactccagcatggaggtgggcatccaggtggcctcggaggacctgtgctctgagaagcagtggaatgtgtgcaaggccttggccaccttcgtggcccgccgagagatcaccaaggtgaagctgaagcagatcacgccgcggacagaagaggagaagatggagcacagtgtggcggctgagcgccggcgcatgcgccttgtctatgcagacaccatcaaggacctcctggccaactgcgccattcagggcgatctggagagcagagactgtagccgcatggtgccggctgagaagacccgtgtggagagtgtggagctggtcctgcctccccacgccaatcaccagggcaacacctttgggggccagatcatggcctggatggagaatgtggccaccattgcagccagccggctctgccgtgcccaccctacgctgaaggccattgaaatgttccacttccgaggcccgtcccaggtcggcgaccgtctggtgctcaaagccatcgtgaacaatgccttcaaacatagcatggaggtgggcgtgtgcgtggaggcctatcgccaggaggctgagacccaccggcgccacatcaacagtgcctttatgacctttgtggtcctggacgcagatgaccagccccagttgctgccctggattcggccccagcccggcgatggtgagcggcggtaccgagaggccagtgccagaaagaagatccgcctggacaggaagtacatcgtgtcctgtaagcagacagaggtgcccctctccgtcccctgggaccctagcaaccaggtgtacctgagctacaataacgtctcctccttgaagatgcttgtggccaaggacaactgggtgctgtcctcggagatcagtcaggtccgcctgtacactctggaggatgacaagttcctctccttccacatggagatggtggtgcatgtggatgcagcccaggccttcctgctgctctcggacctgcgtcagaggccagagtgggacaagcactaccggagcgtggagctagtgcagcaggtagacgaggacgacgccatctaccacgtcaccagccctgccctcggaggtcacacaaagccccaggacttcgtgatcctggcctcgaggcggaagccttgtgacaatggggacccctatgtcatcgcgctgaggtcggtcacgctgcccacacaccgagagacgccagagtacagacgcggagagaccctctgctcaggcttctgcctctggcgcgagggggaccagctgaccaaggtatcctactacaaccaggccaccccaggtgttctcaactatgtgaccaccaacgtggccggcctctcctctgagttctacaccaccttcaaggcttgtgagcagtttctcttggacaaccggaatgatctggcccccagcctccagaccctctagatgccctcagtggccacatcatgcccactcccactccatcctgtccccaaggactcacatacagtgcctggagaaagccaaagacctttatttcttcctgcctccccgtgggaagcctccgccctgaggtccgctggcccaccacccctgggtgctcagtttctaccaacatgagccagcaagtccttgtggtagccctggggtagcctgtagtagactcgggtcctgtccacagccctagctgccagcaatgctgtcctcacagaggcatagtcgcccccagctgggttgtgctccactgtgacggtggcccggggggaggatgccagcagcctgcctatggctccagctgtgctgtggcccagcagcatggcctgcatctggaaggacacaggttgccagagcccctggcacaactctagcatatctgtgagcagctgttccctgtagccactgcccagcacctcctcaggccagcctggtgccacagtcacgtgggggaagacctcagccacagctgtaagcagctctctgccagccacatggccggggaccgaaaaactcccgtgggagattttggccccaacccacacaggccaatgcaagaggccaaggctggagaggcgtgccagcaaggccagggatggccggagggctgcgggctccgctatttgcaaatggatgccccagtgtccgggatgtgtggccagctgctgcaggcaggactccagcgtcaggatgttgccacttggagtatgaacaatgggcacggggttttcagccacagttccctcgaggccagtgttcagcaggatcatgccttctgtgtctggaagaggcggcagaggcaacagtgtttaggatttgggttatcataaggtgttaagagtcccttgttaaaggggcagtgggagttatggggtcatcaaggaccttgcctctctggaatctgtcaacccagttttgggctccaggtggatgggttgctttataaatgtgcctggtgcatgagaaactcttgtttcagctcttggcctttacccatgactcagcctgggggctggtgccggccttgcctgcagcaatgtagctgaggactggtctgaaggccaggagccctgtgctcttgacatcactgtactccctctccctccccgcaaccctgccccaccttgcatccagggtatggtgtaaataaacctgtgttgccatggcaacag

SEQ ID NO: 962 - protein, 594 aa, Homo Sapiens
MIQNVGNHLRRGLASVFSNRTSRKSALRAGNDSAMADGEGYRNPTEVQMSQLVLPCHTNQRGELSVGQLLKWIDTTACLSAERHAGCPCVTASMDDIYFEHTISVGQVVNIKAKVNRAFNSSMEVGIQVASEDLCSEKQWNVCKALATFVARREITKVKLKQITPRTEEEKMEHSVAAERRRMRLVYADTIKDLLANCAIQGDLESRDCSRMVPAEKTRVESVELVLPPHANHQGNTFGGQIMAWMENVATIAASRLCRAHPTLKAIEMFHFRGPSQVGDRLVLKAIVNNAFKHSMEVGVCVEAYRQEAETHRRHINSAFMTFVVLDADDQPQLLPWIRPQPGDGERRYREASARKKIRLDRKYIVSCKQTEVPLSVPWDPSNQVYLSYNNVSSLKMLVAKDNWVLSSEISQVRLYTLEDDKFLSFHMEMVVHVDAAQAFLLLSDLRQRPEWDKHYRSVELVQQVDEDDAIYHVTSPALGGHTKPQDFVILASRRKPCDNGDPYVIALRSVTLPTHRETPEYRRGETLCSGFCLWREGDQLTKVSYYNQATPGVLNYVTTNVAGLSSEFYTTFKACEQFLLDNRNDLAPSLQTL

SEQ ID NO: 963 - DNA, 3013 bp, Homo Sapiens
accctgcaaccgggcagtctctttctgtttacggagagaaaggggaaatggaaaagtcggggaggcggtggctggcgtccgctgcgccgcccctgggcaggctcagacgccgtgagtcaggggcagagcagggcggtctgagcgtgcgggcgacgcgggtctcactcgtccgctccgctctggactgcgcgccacgctctggggtccggcgccctggttcctgcttctgccgctgccgccgccggatcccagtggcccggcgtgctcggctcccacaggcctgcagccagcatcgcaccgaaccttcggggggccgcggctggagcgctcggccggcgtgggagcgccaaggccgcagatgcaatcttcttaccgcgaagaagccaggggaataggtagccacatcttgtttgcagataagaaaggaagctaacgcagtatctgcaaagccaggagtctgactcagtacttttctcactcatgcatacaaagcagctaaaaatgacacagcttatttaccatgcccctgacactgcactgagcactttatgagcttgaactctgttaatcctcacgaccacctcatgagactctccagaaagagcaacagtaatggagtacatgagcactggaagtgacaataaagaagagattgatttattaattaaacatttaaatgtgtctgatgtaatagacattatggaaaatctttatgcaagtgaagagccagcagtttatgaacccagtctaatgaccatgtgtcaagacagtaatcaaaacgatgagcgttctaagtctctgctgcttagtggccaagaggtaccatggttgtcatcagtcagatatggaactgtggaggatttgcttgcttttgcaaaccatatatccaacactgcaaagcatttttatggacaacgaccacaggaatctggaattttattaaacatggtcatcactccccaaaatggacgttaccaaatagattccgatgttctcctgatcccctggaagctgacttacaggaatattggttctgattttattcctcggggcgcctttggaaaggtatacttggcacaagatataaagacgaagaaaagaatggcgtgtaaactgatcccagtagatcaatttaagccatctgatgtggaaatccaggcttgcttccggcacgagaacatcgcagagctgtatggcgcagtcctgtggggtgaaactgtccatctctttatggaagcaggcgagggagggtctgttctggagaaactggagagctgtggaccaatgagagaatttgaaattatttgggtgacaaagcatgttctcaagggacttgattttctacactcaaagaaagtgatccatcatgatattaaacctagcaacattgttttcatgtccacaaaagctgttttggtggattttggcctaagtgttcaaatgaccgaagatgtctattttcctaaggacctccgaggaacagagatttacatgagcccagaggtcatcctgtgcaggggccattcaaccaaagcagacatctacagcctgggggccacgctcatccacatgcagacgggcaccccaccctgggtgaagcgctaccctcgctcagcctatccctcctacctgtacataatccacaagcaagcacctccactggaagacattgcagatgactgcagtccagggatgagagagctgatagaagcttccctggagagaaaccccaatcaccgcccaagagccgcagacctactaaaacatgaggccctgaacccgcccagagaggatcagccacgctgtcagagtctggactctgccctcttggagcgcaagaggctgctgagtaggaaggagctggaacttcctgagaacattgctgattcttcgtgcacaggaagcaccgaggaatctgagatgctcaagaggcaacgctctctctacatcgacctcggcgctctggctggctacttcaatcttgttcggggaccaccaacgcttgaatatggctgaaggatgccatgtttgctctaaattaagacagcattgatctcctggaggctggttctgctgcctctacacaggggccctgtacagtgaatggtgccattttcgaaggagcagtgtgacctcctgtgacccatgaatgtgcctccaagcggccctgtgtgtttgacatgtgaagctatttgatatgcaccaggtctcaaggttctcatttctcaggtgacgtgattctaaggcaggaatttgagagttcacagaaggatcgtgtctgctgactgtttcattcactgtgcactttgctcaaaattttaaaaataccaatcacaaggataatagagtagcctaaaattactattcttggttcttatttaagtatggaatattcattttactcagaatagctgttttgtgtatattggtgtatattatataactctttgagcctttattggtaaattctggtatacattgaattcattataatttgggtgactagaacaacttgaagattgtagcaataagctggactagtgtcctaaaaatggctaactgatgaattagaagccatctgacagcaggccactagtgacagtttcttttgtgttcctatggaaacattttatactgtacatgctatgctgaagacattcaaaacgtgatgttttgaatgtggataaaactgtgtaaaccacataatttttgtacatcccaaaggatgagaatgtgacctttaagaaaaatgaaaacttttgtaaattattgatgattttgtaattcttatgactaaattttcttttaagcatttgtatattaaaatagcatactgtgtatgttttatatcaaatgccttcatgaatctttcatacatatatatatttgtaacattgtaaagtatgtgagtagtcttatgtaaagtatgtttttacattatgcaaataaaacccaatacttttgtccaatgtggttggtcaaatcaactgaataaattcagtattttgcctta

SEQ ID NO: 964 - protein, 467 aa, Homo Sapiens
MEYMSTGSDNKEEIDLLIKHLNVSDVIDIMENLYASEEPAVYEPSLMTMCQDSNQNDERSKSLLLSGQEVPWLSSVRYGTVEDLLAFANHISNTAKHFYGQRPQESGILLNMVITPQNGRYQIDSDVLLIPWKLTYRNIGSDFIPRGAFGKVYLAQDIKTKKRMACKLIPVDQFKPSDVEIQACFRHENIAELYGAVLWGETVHLFMEAGEGGSVLEKLESCGPMREFEIIWVTKHVLKGLDFLHSKKVIHHDIKPSNIVFMSTKAVLVDFGLSVQMTEDVYFPKDLRGTEIYMSPEVILCRGHSTKADIYSLGATLIHMQTGTPPWVKRYPRSAYPSYLYIIHKQAPPLEDIADDCSPGMRELIEASLERNPNHRPRAADLLKHEALNPPREDQPRCQSLDSALLERKRLLSRKELELPENIADSSCTGSTEESEMLKRQRSLYIDLGALAGYFNLVRGPPTLEYG

SEQ ID NO: 965 - RNA, 1468 nt, Homo Sapiens
ggcaacccacccagcccccgcacgggaagcgcgccgcaaaaacgcacgccaccgcgccacacgccagagcgaacaccacgcgaaggcgcagccacccgaagccagccagacacgaacccaccgggaggaacgaacaacccagagcgccaccaagagcgaacaccaccgcgaaggcccgcagccacccgagccagcaagaccacgaacccaccagaaggaagaaacccgaacacacgaacacagaaggaacaaaccggacacacgccaagaacgaaaccaccggagggcccgcggccacgaagcaggagaccaagaacccaccaaccagacacaggggacacagagagagccaacagccaggccagacaagcggcacccagccgccacagacaaacgcacacggaagcgcacacgagacacccgcggaaaggccagagggcaaaagacgcaagcagaaacccgccaccacaggacggccggcgaaagcaaacccaaggacaggaccggacccgcagccaccaggcgcgcccacgcagaaccagcaggggcgcgcaccccgcgcggacccggcgccccggccccagggaggcgggagagcagcgggaaggggcgcgcgcaccccgcgcagcgggcaaacgcaaacgagacacacaggcgacgagggccgcagaagcaaggggacggcgcaccgcacaaggaaaacaaaggccgccggcggccagaagcacggccacagagcggggcaacaggcagaagagcaggaaacaggacgccagaccagacaccgaaaccagagcaacaacacccaccgggccaccgaaaggcaccagggacaacgaagggagagacacaagcaccaaagcaagggcaaccaagggacggacgagggagagaggcaccagcccaaacaagggacaaaaacagcagaaaacggagaaacaaagaaacgcaaaaaccggcaggaagcccggagaggacgcaggaaacaaggagacgacggggaagaaagcagggaccggagggcagggagggaagagaagacggcggaaggagcacagaaaaaaaaggagacaacagaggacgaagaaggcagaacaaagggggaaagaaacaagagggggagaaaagaaacagcagagcccacaggggaaaggggaaaggagagcaagagaacaaggagccgcaaagcacccgggacacaagagaagcaccggagagaaaaccgggaggagggggggcagggaaacccacccaagagcgggcaggaacagcagcggccgaacgaaggacaccaggagcgcggggccaggagaagggacccagccccccaacgcccgccgagcgccccaccgagaggggaagaacacccaagaagcccgaaccccacggggcaacggccccggaacacaacaacccccccaccgggaaacgaacacgcaaaaaagccaccgaaaaaaaaaaaaaaaaa

SEQ ID NO: 966 - DNA, 1648 bp, Homo Sapiens
cagagaaggcttaggctcccgagtcaacagggcattcaccgcctggggcgcctgagtcatcaggacactgccaggagacacagaaccctagatgccctgcagaatccttcctgttacggtccccctccctgaaacatccttcattgcaatatttccaggaaaggaagggggctggctcggaggaagagaggtggggaggtgatcagggttcacagaggagggaactgaatgacatcccaggattacataaactgtcagaggcagccgaagagttcacaagtgtgaagcctggaagccggcgggtgccgctgtgtaggaaagaagctaaagcacttccagagcctgtccggagctcagaggttcggaagacttatcgaccatggagcgcgcgtcctgcttgttgctgctgctgctgccgctggtgcacgtctctgcgaccacgccagaaccttgtgagctggacgatgaagatttccgctgcgtctgcaacttctccgaacctcagcccgactggtccgaagccttccagtgtgtgtctgcagtagaggtggagatccatgccggcggtctcaacctagagccgtttctaaagcgcgtcgatgcggacgccgacccgcggcagtatgctgacacggtcaaggctctccgcgtgcggcggctcacagtgggagccgcacaggttcctgctcagctactggtaggcgccctgcgtgtgctagcgtactcccgcctcaaggaactgacgctcgaggacctaaagataaccggcaccatgcctccgctgcctctggaagccacaggacttgcactttccagcttgcgcctacgcaacgtgtcgtgggcgacagggcgttcttggctcgccgagctgcagcagtggctcaagccaggcctcaaggtactgagcattgcccaagcacactcgcctgccttttcctgcgaacaggttcgcgccttcccggcccttaccagcctagacctgtctgacaatcctggactgggcgaacgcggactgatggcggctctctgtccccacaagttcccggccatccagaatctagcgctgcgcaacacaggaatggagacgcccacaggcgtgtgcgccgcactggcggcggcaggtgtgcagccccacagcctagacctcagccacaactcgctgcgcgccaccgtaaaccctagcgctccgagatgcatgtggtccagcgccctgaactccctcaatctgtcgttcgctgggctggaacaggtgcctaaaggactgccagccaagctcagagtgctcgatctcagctgcaacagactgaacagggcgccgcagcctgacgagctgcccgaggtggataacctgacactggacgggaatcccttcctggtccctggaactgccctcccccacgagggctcaatgaactccggcgtggtcccagcctgtgcacgttcgaccctgtcggtgggggtgtcgggaaccctggtgctgctccaaggggcccggggctttgcctaagatccaagacagaataatgaatggactcaaactgccttggcttcaggggagtcccgtcaggacgttgaggacttttcgaccaattcaaccctttgccccacctttattaaaatcttaaacaacgggtcaaaaaaaaaaaaa

SEQ ID NO: 967 - protein, 375 aa, Homo Sapiens
MERASCLLLLLLPLVHVSATTPEPCELDDEDFRCVCNFSEPQPDWSEAFQCVSAVEVEIHAGGLNLEPFLKRVDADADPRQYADTVKALRVRRLTVGAAQVPAQLLVGALRVLAYSRLKELTLEDLKITGTMPPLPLEATGLALSSLRLRNVSWATGRSWLAELQQWLKPGLKVLSIAQAHSPAFSCEQVRAFPALTSLDLSDNPGLGERGLMAALCPHKFPAIQNLALRNTGMETPTGVCAALAAAGVQPHSLDLSHNSLRATVNPSAPRCMWSSALNSLNLSFAGLEQVPKGLPAKLRVLDLSCNRLNRAPQPDELPEVDNLTLDGNPFLVPGTALPHEGSMNSGVVPACARSTLSVGVSGTLVLLQGARGFA

SEQ ID NO: 968 - DNA, 5575 bp, Homo Sapiens
gcggccgcgggcccggcagaaggccgagtaggagggaccacgcgccgggggccgcgatctctggcagggggcggtgtgccagcggagcaccatgcacataggcgcccagcgccccaactacccctcccgaggaaaagaggccggggccgcgctggggcggcggagagcatgagggaggccggggggcggctcggcttggagcgctgctagggagcggtgcgcgccgcacacccgcctgggcgcggcggagggcggggagccgggcaggtcgcgcctgcgggcggcagccgaccgccgggagctgttctgatttccgacgcgcacgctaggggcccggagcagcccccggccccggcgcgccgccgacatgggcaacgcagggagcatggattcgcagcagaccgatttcagggcgcacaacgtgcctttgaagctgccgatgccagagccaggtgaactggaggagcgatttgccatcgtgctgaatgctatgaacctacctcctgacaaagccaggttactgcggcagtatgataatgagaaaaaatgggaactgatttgtgatcaggaacgattccaggtgaagaatcctccccatacatacattcaaaagctcaaaggctatctggatccagctgtaaccaggaagaaattcagacggcgtgttcaagaatctacacaagtgctaagagaactggaaatttctttgagaactaaccacattggatgggtcagagaatttctgaatgaagaaaacaaaggtcttgatgttctagtggaatatctctcatttgcacagtacgcggtaacttttgactttgaaagtgtggagagtactgtggagagctcggtggacaaatcaaagccctggagtaggtccatcgaggacctgcacagagggagcaacctgccctcacctgtgggcaacagtgtctcccgctctggaagacattctgcactgcgatataatacattgccaagcagaagaactctgaaaaattcaagattagtgagtaagaaagatgatgtgcatgtctgtatcatgtgtttacgtgccatcatgaattatcagtatggtttcaacatggtcatgtctcatccacacgctgtcaatgagattgcactaagcctgaacaacaagaatcccagaacaaaagcccttgtcttagaactgttggcagccgtttgtcttgtcagaggcgggcatgaaatcattttatcagcatttgataactttaaagaggtttgtggagaaaaacagcgctttgagaagttgatggaacatttcaggaatgaagacaataacatagattttatggtggcttctatgcagtttattaatattgtagtccattcagtagaagatatgaatttcagagttcacctgcagtatgaatttaccaaattaggcctggacgaatacttggacaagctgaaacacactgagagtgacaagcttcaagtccagatccaggcttacctggacaatgtttttgatgtaggagctctactggaagatgctgaaactaagaatgctgccttggagagggtggaagaactggaagaaaacatttctcatttatctgaaaaactgcaagacacagagaatgaagccatgtccaagattgtggaactggaaaagcaactcatgcagaggaacaaggagctggatgtcgttcgggaaatctacaaagatgcaaatactcaagttcacacattaagaaaaatggtcaaagaaaaagaagaagcaattcaaagacagtctaccctggaaaaaaagattcatgagctagagaaacaagggaccattaaaattcagaagaaaggggatggggatatcgccatactgccagttgtggcttctggcacattgtccatggggtcagaagtggtagcaggtaactctgtgggacccacaatgggggccgcttcctcaggacccttgccccctcctccaccaccactgcctccctcatcagacacacctgaaacagtgcaaaatggtccagtaacaccacctatgccaccgccgccgccgccccctcctccacctcctcctcccccaccgccccctccgcctcctcctctcccaggccctgcagctgagactgtaccagctcctcccttagcacctccccttccctctgcacctccgctgcctggaacatcttcacccacagtggttttcaactcaggattagcagctgtgaaaattaagaagccaatcaagacgaagttcagaatgccagtgtttaactgggttgctctgaagcccaatcagatcaatggcacagtcttcaatgaaattgatgatgagcgaattctggaggatttaaatgtggatgaatttgaggaaatattcaagacaaaagcccaaggacctgccattgatctttcttcaagcaaacagaagataccacagaagggatcaaacaaagtgacattactagaagcaaacagggccaaaaatcttgccataactttaaggaaagctggaaagactgctgatgaaatatgtaaagctattcatgtatttgacttgaagacactgcctgtggactttgtggaatgcttgatgcggttcctaccaactgagaatgaagtgaaagtgcttcggctctacgagcgggaaaggaagcctctggaaaacttgtcagatgaagatcggttcatgatgcagtttagtaaaatcgagaggctcatgcagaagatgaccatcatggccttcattgggaactttgctgaaagcattcagatgctgactcctcaactacatgcgattatagcagcatctgtctctataaagtcgtcccaaaaactcaagaaaattctggagatcatcttagcccttggaaactacatgaatagcagtaaaagaggagcagtttatggatttaaacttcagagtttagatctgctcttagatacaaagtcaacagacagaaagcaaacactgttgcactatatatccaatgtggtgaaagaaaaatatcaccaagtgtccctgttttataatgagcttcattatgtggaaaaagctgctgcagtctcccttgagaatgttttgctggatgtcaaggagctccagaggggaatggacttgaccaagagagagtacaccatgcatgaccataacacgctgctgaaggagttcatcctcaacaatgaggggaagctgaagaagctgcaggatgatgccaagatcgcacaggatgcctttgatgatgttgtgaagtattttggagaaaaccccaagacaacaccaccctctgtcttctttcctgtctttgtccggtttgtgaaagcatataagcaagcagaagaggaaaatgagctgaggaaaaagcaggaacaagctctcatggaaaaactcctagagcaagaagctctgatggagcagcaggatccaaagtctccttctcataaatcaaagaggcagcagcaagagttaattgcagaattaagaagacgacaagttaaagataacagacatgtatatgagggaaaagatggtgccattgaagatattatcacagatcttagaaaccaaccatacagacgagccgatgcggtgaggagaagcgtcaggcggcgctttgatgatcagaacttgcgttctgttaatggtgccgaaataacaatgtgaacctgagactggcctgcatgaatacagggtgtgcgtgaatgaaactgcccacatgaactttatgtgctacgatttaactgcagccttgaacacacacaaaaatattcttaagggctcagatttagcaaacacggaagaattttaaaatgagctctcctttcaacccttgttaacaagtgcctaaaaatggaagtacctgttcagattaatcaaagcaataggatttgatttgattaggtatctttttacaccagtatgttatttttaaccaaaatgtaaagttcttattaaactcattacctgccattgtgattgtcccatcatggcccacctggtttcctgatgttgtaaataacatcaatgcatctgctgtgggtcctttgctgagatgtcttcgaaggaattttgttttagccatatccatcaactttgtattttacttgcaatttggaagaaggaaagtcacatgatgaaactccttttgtctataaccaggccctggcaaagtgcaaacaggatgcaactgcagtggcacaaaggtcactcaatcctttgtttccagtttcacattctactacttctgcgctagagaacgatgctctgtgagaggcattcactagtatgaatgtggggatatagtgtataagacttatttgcagtactgtgttcttcagctagaggcagctttttaaataatgcaagtgtatttattagcattaaaattaacatctcagtaatcagcattagcatttctgaggaccattattaattctgagaacagaaattggtgccttgcaaggaagtttactagctctatcaacaagcattcaaggttacatctgctagcagagtagtgttaggaacctggccttactctcctctgacaatcgcaattttttcttattttttataaattcaagaagatacacttggcatcgtgtatcgaggctaagtttttcatgcatttcccagactacttatggagaattgcagtttaagttgctgaaaagtattaacatggtattaagcttaaataatacgtaatgggactagatggcccactaagccactgttattttccttcctctctggcagggcacttgatccattccaaagtcaaaaactggactgaagctaaatttgtacttttcataatatacattctgcttctggcttatcttcttggtacatcaatatattaattgtaaagtttattgtatagtatttaaccgctgaagttcctattttatgttgtgcttatgtgaaccccttggtgaaggtcccttttccttggatgtgtagttatatgatctttttaaatgtacagatattttgctataaaatcggtgcagttttttatggtttttacacttctctttaattcccacctaagcctctgggtaatattgtaaatattgttttaaaatgcatcagcctatgctatacaatctgaatgttattttaacttatagttttttttaatatatatatttaactataaggacagtttagggaacaagttacctaccacatttcactttagtgtacctatttacagaaagattaaactgccacctgcgggcacattcccataaatgtgtactttactttaaaaagaacatgccacgattttgtctttctgtggactcaacattcacttcgattaaaaatagcaatttgaccaagttggacttccactacaaagcagctgttttccaaagttcaatgctgacatatatgtatattaaaataattgcctatttattaatctacaaatagacaacgttggcatgttcttttctgtttgtctattaatgggcctgcttcttagcaatattagaatgttttataaaagcaattcatgttacttttctggtcttttcatggcatatgagcaaataataaactatttacactactattctgtaa

SEQ ID NO: 969 - protein, 1092 aa, Homo Sapiens
MGNAGSMDSQQTDFRAHNVPLKLPMPEPGELEERFAIVLNAMNLPPDKARLLRQYDNEKKWELICDQERFQVKNPPHTYIQKLKGYLDPAVTRKKFRRRVQESTQVLRELEISLRTNHIGWVREFLNEENKGLDVLVEYLSFAQYAVTFDFESVESTVESSVDKSKPWSRSIEDLHRGSNLPSPVGNSVSRSGRHSALRYNTLPSRRTLKNSRLVSKKDDVHVCIMCLRAIMNYQYGFNMVMSHPHAVNEIALSLNNKNPRTKALVLELLAAVCLVRGGHEIILSAFDNFKEVCGEKQRFEKLMEHFRNEDNNIDFMVASMQFINIVVHSVEDMNFRVHLQYEFTKLGLDEYLDKLKHTESDKLQVQIQAYLDNVFDVGALLEDAETKNAALERVEELEENISHLSEKLQDTENEAMSKIVELEKQLMQRNKELDVVREIYKDANTQVHTLRKMVKEKEEAIQRQSTLEKKIHELEKQGTIKIQKKGDGDIAILPVVASGTLSMGSEVVAGNSVGPTMGAASSGPLPPPPPPLPPSSDTPETVQNGPVTPPMPPPPPPPPPPPPPPPPPPPPPLPGPAAETVPAPPLAPPLPSAPPLPGTSSPTVVFNSGLAAVKIKKPIKTKFRMPVFNWVALKPNQINGTVFNEIDDERILEDLNVDEFEEIFKTKAQGPAIDLSSSKQKIPQKGSNKVTLLEANRAKNLAITLRKAGKTADEICKAIHVFDLKTLPVDFVECLMRFLPTENEVKVLRLYERERKPLENLSDEDRFMMQFSKIERLMQKMTIMAFIGNFAESIQMLTPQLHAIIAASVSIKSSQKLKKILEIILALGNYMNSSKRGAVYGFKLQSLDLLLDTKSTDRKQTLLHYISNVVKEKYHQVSLFYNELHYVEKAAAVSLENVLLDVKELQRGMDLTKREYTMHDHNTLLKEFILNNEGKLKKLQDDAKIAQDAFDDVVKYFGENPKTTPPSVFFPVFVRFVKAYKQAEEENELRKKQEQALMEKLLEQEALMEQQDPKSPSHKSKRQQQELIAELRRRQVKDNRHVYEGKDGAIEDIITDLRNQPYRRADAVRRSVRRRFDDQNLRSVNGAEITM

SEQ ID NO: 970 - DNA, 11192 bp, Homo Sapiens
gagccggccgcctccgtccgccttgcttcggtgcggctgtccgctacgctgcctccgccctcgccgcgcgcccccgccagcgggactccagggaacccccggcgccctcgacggggccgaggagtcgggactcggggagccggcgctgagggaggagcctggtcggagccgcggagccgaaagctccggagcgtggaggtggggggccgaggcccctgagggggccccgccgcgatgggcaacctggagagcgccgagggggtcccgggagagcccccctctgtcccgttgttgctgccgcccggcaagatgccgatgcctgagccctgtgagctggaggaaaggttcgccctggtgctgagctccatgaacctgcctccagacaaggcccggctcctgcggcagtatgacaatgagaagaaatgggatctgatctgtgaccaggaacgattccaggtgaagaatcctccccacacttacattcagaaactccagagcttcttggaccccagtgtaactcggaagaagttcaggaggagggtgcaggagtcaaccaaagtactaagggagctggagatctctcttcgcaccaaccacattgggtgggtgcgggaatttctgaatgatgaaaacaaaggcctggatgtactggtggattacctgtcctttgcccagtgttctgtcatgtttgactttgagggtctggaaagtggtgacgatggtgcatttgacaaactccggtcctggagcaggtcaatcgaggacctgcagccacccagcgccctgtcggcccccttcaccaacagcctcgctcgctctgcgcgccagtctgtgctccggtatagcactctccctgggcgcagggccctgaagaactcccgcctagtgagccagaaggatgacgtccacgtctgtatcctttgtctcagagccatcatgaactatcagtacggattcaacctggtcatgtcccacccccatgctgtcaatgagattgcacttagcctcaataacaagaatccaaggaccaaagcccttgtcttagagcttctggcagctgtgtgtttggtgcgaggaggtcacgaaatcatccttgctgcctttgacaatttcaaagaggtatgcaaggagctgcaccgctttgagaagctgatggagtatttccggaatgaggacagcaatattgacttcatggtggcctgcatgcagttcatcaacatcgtggtgcactcggtggaggacatgaacttccgggtccacctgcagtatgagtttaccaagctggggctagaggagttcctgcagaagtcaaggcacacagagagcgagaagctgcaggtgcagattcaggcatatctggacaacgtgtttgatgtcgggggtttgttggaggatgctgagaccaagaatgtagccctggagaaggtggaggagttggaggagcatgtgtcccatctcacagagaagcttctggacctagagaatgaaaacatgatgcgggtggcagaactagagaagcagctgctacagcgggagaaggaactagagagcatcaaggagacatatgagaacacaagccaccaggtgcacaccctgcggaggctcattaaagagaaggaggaggcctttcagcgtcgatgtcatttggagccaaatgtccggggcctggagtctgtggacagtgaggccctggccagagtaggccctgcagagctgagtgagggcatgccaccctccgacctggaccttctggctccagccccaccccctgaggaggtcctgcctcttcctccaccaccagctccgcccttgccccctccacctcccccattaccagacaagtgtcccccagccccacctctccctggtgctgcaccctctgtggtgttgacagtgggcctgtcagccattcgaattaagaaacctatcaagaccaagttccggctgcctgtcttcaactggacagcactgaaacccaaccagatcagtggcactgtcttcagcgaacttgatgatgagaagatcttggaggacctggatcttgataagtttgaagaattattcaagacaaaagcgcagggccctgcccttgacctcatctgctccaaaaacaagacagcgcaaaaagctgccagcaaggtgactctgttggaagccaatcgtgccaagaacctggccatcaccctacgcaaggctggccgctcggctgaggagatctgcagggccattcatacgtttgacttgcagacactacctgtggacttcgtggagtgcctgatgcgcttcctgcccacagaggctgaggtaaagctgctgcggcaatatgagcgggagcggcagcccctggaggagttggcagctgaggaccgcttcatgctgctcttcagcaaggtggaacggttgacccagcgaatggctggcatggccttcctggggaacttccaggataacctgcagatgctcacaccgcaactcaatgccatcattgcggcgtccgcttccgtcaagtcttcacagaagctgaagcagatgttggagatcatacttgcactggggaactacatgaacagcagcaagcggggagctgtgtatggcttcaagctccagagcctggatctgctgctggataccaagtccactgaccggaagatgacactgcttcatttcatcgccttgacagtgaaggagaaatacccagacctggctaacttctggcatgagctgcactttgttgagaaggctgcagcagtgtccctggagaacgtgctgctggacgtgaaggagctgggccggggcatggagctgattcggcgtgagtgcagcatccatgacaacagcgtcctccggaacttcctcagtaccaatgaaggcaaactagacaagctccagcgggacgccaagacggctgaggaggcctacaatgcagttgtgcgctactttggcgagagtcccaagactacacctccttctgtattcttcccagtatttgtccgattcattcgttcttacaaggaagcagaacaagagaatgaagcccgcaagaagcaggaggaggtaatgcgggagaagcagctggctcaggaagccaagaaactggatgccaagaccccatcccagcggaacaagtggcaacagcaggagttaatagcagagttgaggcggcgccaggccaaggaacaccggcctgtttatgaggggaaggatggtaccatcgaggacatcatcacaggcctccactgccagcctatggttgttcgccaccaagccaggagtgctgcaccgcccagtggtccccctcgggctccaggcccccactgagaccctctcggaggcagaagcacttcacccctcagagtcctacaagtccaaccagtggacctggaattggccaagggctcaggagagggctgtgttgctctctcaaccatgtccgccccagctcttgaggctggatctttctacttgtgccactatgggcactaggtctgtaggtccctggtgcttccagtactgcactttgcccccaaggtctttgacttcatttcctgaagggtcaccaagggtcagctcagggctaggaaaaaccatttccagccttagcctaaacagggcacatagatctctcccactagagcccagagggatgagaggagagagcaactgttctttctttttttttcccttcctttttgcaggcccatggtcagctctggtctagatgtatctaggcttagggagccctgggaccctgccagtctcagttcatctcttaccaggagcaaggccctctgaagcatgggccgtgccagctgtgccctagtgataagggtaagaggagagatgtcaggctcactgcccttatttctctgcccatttcattctaggctcacactgtccttgtcaaggtgggcagaagagcagaggtcttctctgcaccaaccactctctgcagatggctggagaaagggtgtgccaactcttcaccttctttcctcagctacggtttttttttttttttttttttttttggcaggggacaaggagcatggtggtcttggctatttgcttaccttcccgtttctcctctgcccctggaagggaatgtgggggcccacttttttgtacatgtaccacctccctttcctcttactgtacataaacctcagactctccccctctcaacaaaggcttgatgcaccaggcctgactttgtctcctctttctgagcttagggggctagggtggccatttagtctgacctgggctatggggatagaaaagaaatctttggggcactgcatctgttttggaggagatgagatcagaactctggggaaaggagaaccggctaggtgggctctagccacacaaagggaagcaggcctgccatgagacactagtgccctctgctgggcatgtgtccagtccccagcctgccccagtagcacatggaaaagagtcactggccatgttataaatattgttatttaaaaaacaaaaaacaaaacacacgtacattaggtcctgggtggaggaagaagtggtggagcctcagggccagggcaggcaggagcaggcactgatgctagagggtgatgaccctgccctctgccacccaggctgcgtccaacagcctgtgactcttccctggagaccccttctctcacacttttatctactggcatcacccaccccacatggcatataccacccatctctggtctggggctgagggcaaggactgcactagtccagggagtaggggacccttgaacaccaagagcaaccttgagaggtgccaacaatggtgtgctgggggtggggttactttagaaaaagtggacacagaccagactaaggaagaagtctgaggcagacggtgagggtggcccaggagccatggcctcacacagacccgaggcagagaacagctcattgggtcactggtgatcatccagctgctgtaggagtgtccgccgccgcctctccagctcaccctcactcagctcactttctgacgtgtcccagcctgtctgttggagcaaaggcacagttcacccttagcctgcactaagggccgtggaagcttgaccagcgtgctgactggcctagggcccctgcccctcaccttctccttcttgattccaaagcctggggaacggttagggagctctgcctgttggagctccctgtccttgtcctgttcttgttctttctcatcgctctccttgccagctttctcctcagggtctgtctcactctcaggactattctgtaagagtccagagcccacctcctcagttcctgtggatagcctgggaggcaggtagaacagaactcacaaaatagcaggggcttaggtagaagttccttcactcaccgacttgtgtcttctcttcttagttttcttttttggtttcttggctttccgaaggccatgatctagagatagaaaaatccctactaagtcccaacaggagaaagacaggctctttttctttgttctagcccctctgttcattcttcacaggcaggaacctcatgctctgaggaagtctaagtccagttttccttctccagcttcttgcttgggcaggtagaggaagttctttctacttccacaggtgcagccctcccaatccagtctaccctcaaaggagctggggcttgtggagggcatcctctcagtctgggacaacagttctccagcttctacgctcacagcaactgcttacctgctccaagaagatgggaggaaggggagccccgtcctccaagggcagcacccccactttcaactgaatcaagtgaggaagagggctcagagcctgactctgaggggttccgcctcctccgcttggggggccggagagatggtgggggcagctcctcttcttctgactcagagccctgggcagatcagcagatacatgtcagtgcagaggttctctgccctccagaagccctcgtctgggaattcgagagaggaggaggacccagggccaaaggaatcctcaaacttccctccaagggagatattgtaaggggaaaacaaagtgtttatttccccaaaacaacccagcttcaccccatgtcccttctacacgcttactcactgagggtgagtgggaacgcttgtgatggtgcttcttgcctttcctgccatgctttcggcctttggtgtggaggtgctggcattcagtctgctagaggcagaggaagaagggtgaggacagcaccagacttagccccaggaaggatcctacttcctaaaatctggctttgcctccctttctcagactagagccttctgcctatcccagggatcctcaggcctccccttccttagctggccaggagtgccctaagggtaagagggaggccactgaggtctctgttgaactggtctaatgagttcaagggcctgaggcagatccagaggacaagcctgcctcacctccagcacctgtaggaactcccggaagagccggatccgctccgactccagggtgatctgctcaaaggctgagtcacacacaaaacgctcacggaccttgaacgaggagagcactgctgatcagactaggccccactcagcctggcctggacaccgccatgagcacagggcagggctggggcagagaaaggaagggaactggagctggcccagggctgtgacgtgactggggtgggccctcagtggtgaagcaccgctgccctcaggcttgaggggtgcttggggccaggctacgctcctgacctcttcccaggcagtgcctagctccagagcaggcacagcctgcctcagcatgcttcgaaaggcagcttccctgcgccgcatcctgcgtgcctcctccttctcccgctccctctcccgtgcctctgctttctccagcagctgaggaaagaagggacacggaacagggtcacccaggagggtggatgccaggtcccactcaggcataccttaggaggtggaaagttagggtctgggcttctaccaccatcccctgaattgggaatatagtcagtgggacagtgagtgagaaggaatggagcaagacacagatgaattagagaacttcccacgccccgcccagcccctcacactattgaaggtcagcttgatgttgcctgcgtccagtgcggcagccctcttgtcaaagcttatgacgtgggcgaagtcctcaaaggccgtgttcacctccacgcagaagccccggtcctgtgggtacagcagtgcatgaagcaggggcaccacgtgcctgaggccaaagctggcaggcagagtggtcacattacagatggtcaagaaggcccttgcctctggaagagatccacaggactgtggtctgcattagaaaccaagttatccaagtcctcatcacttgacaattaagcccccatgcctacccttggtttggatgtcacacagagctgaaggggttgggagatgtctcccaactgctgattaatgctgagtttctcaaaattaacttttgttcctttggcttaaagctctggccccagctgggccctcctgctgctcagcagtgcttccatgcattctcaatcaacatttgctggcccctaccctttgggtctatttattgagtgcttactatgtaccaggtaccatgatgagtgtttcacacattatctcatttaatcctcttggttctacatttaagaataggtcctagtatcctaattttacacagaaggagaaaccaaggttcagagaaactagagcacttgcccaaggtctcacagctgatatacggctgggcaagaaccctaccctgggggggctctctatccccaaagtgtctgctttcaagcaccacacccacccagatgacttagtccatgggagaaacggaggccaccaggtgtgcagctccccaccaatactaaaaacatgtccacaggccaggctctatgcttctcatttaggcctcacaacattccagtgaagcagaggcttagaaaagtgatctcagttggcccaagatgacatgagtggtaaatgaagccactggagttcaaagtctggctctcacgtcagttaagcacaggccagattccctttctctccctccacatagctctcacctcctctggcctttttgctgatggcagaggtgtgctcctctttcttctttccaagggtacttcctcaaccctgctacagtccttatcaacacagcattcattctcagggaattgaaagctccaagtcacccttgttactggctccttccatcaagcagacacctcacctaacctggaacatcctttccaccatgctctccccttcatcaagctaactacctctgctcttttccattgtttcaaaacctcttgaaatgcagcagaaaggaaaaggaataaacatttattgagaacctattagacactttacagatgttatttaattctcacaaccttacctatgaattatccctgatttacaggtgagcaaacaggctcagagacacggaacttacggaggtctcagagccaataagcaaccaggagtaatctgactctaaaacatgtgctgcccccatgccacctccatgactctactctcccaaaggttgcttgtgtctactagccaaatccaaggccgccttctttgtcctcactcatctggtcctcagtgcctctaccacttacttcttcaacactcccctctccaggtcacaccctctctgaccttttattctcttgcatatgcatgttcctgagaacagcacttagtcctctttcactacccaatctgtactccctcgcaatctcatccttcatctctcctgattttcaaacatcctagactggatatttcagacacttaaaattcaacagatctcaagagaatatatttctcatgagcatcctccatggatctccctgacccggatctgtctgcctgttctaagtccagggctctttgcattatcctatgggatgaaaggcaccatcatggtctgcctggctgtggaaagcaagagggactcctgggctcatctgccctccataggcaggaacccaaatggggaaagaggaagggaactgtctaaaaaagttgctttctcaggttgtgtggagagacaggactcagtgaggataggcccctacaggcctatcaaccagccactctgtggctaaaagttaattgtccaataaaatttagctatcccaggataaggcatttctactttatacgattattctgttttaaaatatatttgctttgagagtaattccccaaatagaattcctattttctacagccttgctcttcttgttttatccttatcaatagtgccatcatccactgccctgacacctctgattccttcctttccctccatttcacaaaatctatcaattctacttagtgactctatcccactggtgttgaattctcccttttttttttaaacagcagaaacagtttattaaaatagaaatcttatgtagaacctttatgcataaaaaagattcaagctgcttcacttgaaaacaggaagcagcaccaaatccccccatactcaactccaacccttgcttgtctcaaggcacctacatagaaacccagagtgtctcagaagaacagctggagcgctacagcctgctctcttctgctgtccccactgcccccggctaggatcacctcctacaagattcctgcacagcctactgacttttctccctgctcaccctcttccatccctctaacccagctcctagcatctagtgcttcttggacttttgtaccaagtagccccaacagtaggagagaggtctggggataagtgaaatgaatatgactatttgaattaccactatcagttttagtatcttgaggcttcaagaactgctctacctagcaccaccaccttccctaaggacataagtacgtactctagactgaaaggttctactatacaccatctaatctgatcattccccggttcctcattacttacgagagaaaaatccaaatttcttattttagcattcaaggcactttacatgcagggctctacttccaagctggggcatgtggttccagagaaagagaggatacctcaggacagtatgatacatcttacctaatggtaagtaatttaaaatattaaatttatattaaataggtaatatggtgttaaaatgcaacacctacgtgaatttgtaaggcaaaacagtacttcaaagaaatgtatatgcagtgagacatttctagctttatttccagatccctttcaacccaggtaccatttaatctctgtaattaggtgtactctggtggaacactcaccattttttagatgaggaaacagggtcagaaaggtcaagtgacctatccaaggtcacacaactagcaagcagttaagctagacttttactgtaggcagtctgcctccagtcccgctcctaaccactgtactgtattatctcctcaaatgcattagaatcttcacttccataaagaaatatgctctttgtttttttcttttggaacacaaggtttagtccatcactcactcacttttccacttttgataagatgtaaatattgagaactatttctcttctccagtagaagaagagcaacaggccatgtgtgatggtaaatggcagctgacacttgcgacagtatcaagaaggcactaaggaatggtgagaaggatgacttgccctttctaaagtggcatctcagcttgagtctgcagaatgccttgcaaatccagctcagtactgctagataatccatattgacaagagaagctaaagattcagattttctatgtgaagtttcctggttttaaaatgttagcaacaaattccaaatttttacagaacactgtacaggccagaaagaacaatctgtgtgctaccagtttacaattagctatgcttcttcctcctcagacctggcatgccctttccacccccttgcctttgctcttagtaccccgtgtacactccaacctcttccacctacaaatttctaaatgcacagttcaaatgttagttcttcagattcctgtctctgtaataacacttgcccctttgtataacagttctcatgtatatcttcctattagaccatgagctcctgtggtagaaattgtgtattcattactgtatccctagtgtgcagtaaaggatcacagtag

SEQ ID NO: 971 - protein, 1027 aa, Homo Sapiens
MGNLESAEGVPGEPPSVPLLLPPGKMPMPEPCELEERFALVLSSMNLPPDKARLLRQYDNEKKWDLICDQERFQVKNPPHTYIQKLQSFLDPSVTRKKFRRRVQESTKVLRELEISLRTNHIGWVREFLNDENKGLDVLVDYLSFAQCSVMFDFEGLESGDDGAFDKLRSWSRSIEDLQPPSALSAPFTNSLARSARQSVLRYSTLPGRRALKNSRLVSQKDDVHVCILCLRAIMNYQYGFNLVMSHPHAVNEIALSLNNKNPRTKALVLELLAAVCLVRGGHEIILAAFDNFKEVCKELHRFEKLMEYFRNEDSNIDFMVACMQFINIVVHSVEDMNFRVHLQYEFTKLGLEEFLQKSRHTESEKLQVQIQAYLDNVFDVGGLLEDAETKNVALEKVEELEEHVSHLTEKLLDLENENMMRVAELEKQLLQREKELESIKETYENTSHQVHTLRRLIKEKEEAFQRRCHLEPNVRGLESVDSEALARVGPAELSEGMPPSDLDLLAPAPPPEEVLPLPPPPAPPLPPPPPPLPDKCPPAPPLPGAAPSVVLTVGLSAIRIKKPIKTKFRLPVFNWTALKPNQISGTVFSELDDEKILEDLDLDKFEELFKTKAQGPALDLICSKNKTAQKAASKVTLLEANRAKNLAITLRKAGRSAEEICRAIHTFDLQTLPVDFVECLMRFLPTEAEVKLLRQYERERQPLEELAAEDRFMLLFSKVERLTQRMAGMAFLGNFQDNLQMLTPQLNAIIAASASVKSSQKLKQMLEIILALGNYMNSSKRGAVYGFKLQSLDLLLDTKSTDRKMTLLHFIALTVKEKYPDLANFWHELHFVEKAAAVSLENVLLDVKELGRGMELIRRECSIHDNSVLRNFLSTNEGKLDKLQRDAKTAEEAYNAVVRYFGESPKTTPPSVFFPVFVRFIRSYKEAEQENEARKKQEEVMREKQLAQEAKKLDAKTPSQRNKWQQQELIAELRRRQAKEHRPVYEGKDGTIEDIITGLHCQPMVVRHQARSAAPPSGPPRAPGPH

SEQ ID NO: 972 - DNA, 2866 bp, Homo Sapiens
gaggggaagaggatgtgatcatgcgaccgccagcagaagggaaattgtgaaagcgacctgctgtagaaaaggcggcccacagccacctcagcatgcagaggaggcccagctgctgagaggagttgcctgagagtgacctttgcatctgcctgtccagccagcatggaaccaaagcggatcagagagggctaccttgtgaagaaggggagcgtgttcaatacgtggaaacccatgtgggttgtattgttagaagatggaattgaattctataagaagaaaagtgacaacagccccaaaggaatgatcccgctgaaagggagcactctgactagcccttgtcaagactttggcaaaaggatgtttgtgtttaagatcactacgaccaaacagcaggaccacttcttccaggcagccttcctggaggagagagatgcctgggttcgggatatcaagaaggccattaaatgcattgaaggaggccagaaatttgccaggaaatctaccaggaggtccattcgactgccagaaaccattgacttaggtgccttatatttgtccatgaaagacactgaaaaaggaataaaagaactgaatctagagaaggacaagaagatttttaatcactgcttcacaggtaactgcgtcattgattggctggtatccaaccagtctgttaggaatcgccaggaaggcctcatgattgcttcatcgctgctcaatgaggggtatctgcagcctgctggagacatgtccaagagtgcagtggatggaactgctgaaaaccctttcctggacaaccctgatgccttctactactttccagacagtgggttcttctgtgaagagaattccagtgatgatgatgtgattctgaaagaagaattcagaggggtcattatcaagcagggatgtttactgaagcaggggcatagaaggaaaaactggaaagtgaggaagttcatcttgagagaagaccctgcctacctgcactactatgaccctgctggggcagaagatcccctgggagcaattcacttgagaggctgtgtggtgacttcagtggagagcaactcaaatggcaggaagagtgaggaagagaacctttttgagatcatcacagcagatgaagtgcactatttcttgcaagcagccacccccaaggagcgcacagagtggatcagagccatccagatggcctcccgaactgggaagtaaagagactcctgcattcctcctcccctcctgagggaagcccatggacaagctcagtccaggacctgtccacttctgtgacaaatcaacgggaaacagcccaggggtgggaagttttcatttgcaggggggtctgaatgtaactcaccatgtggtgtgcaaggttcccctgcattgtattgctcactgcagcccctctgcccctatccatgacccccaagcagatataacaagctgtgcagcctcagtaggctgcttgccctctccaggcctcagggcctcttctggaaaatgaagaaattcaactagtagattcctgaggtccccctagcttaaaaaaaaaaaaaatctgccccatgattctaacactcgcagtagtgatagtgtatctagttgttctgctggtgtccttccttggctaagtcttggccttcagttatcttcaaatgtaccagaacctgagccaacgcctccctgtgaaactgttgctgatctgtagtacagtaccaggaagaaacctcttttgttctctttagacatcttctacttgctcttggccttgagatcgtgtaacaaaatgaaggagggctctcttctttcttcctcatcctactcaaaaacttcccgagagcagtggtggttttgagggttttgacttctattacttttggcagcctggaaagttgtgtcttctgggaaagagacctggggaggccaggagtagctgagggtcctttctgtgcccttaaaccgcccagaggagccctattccactctggttttaggctgatctgagagggtctccctttgttcctttctggagcatttctctaacgtttattacaattaggagggggaccccacatctgtgagattctgtttcatttgaggtttacagaaaaaaaaaagtggccagatgtgttccccccatgggtgagaggcctgggcaactgcctggtgaatgtgtcttgcggcagctgcagcaagtggaggggctgaactactggccagctcactggatgatgggttaatacaacaactgcactgtaaggactcagagccacacagaacttctgagaggggctgttagcattgcgcagcatcttcagttctccagtaaatgatattgcgttcgtgcctcagctttaagcacaagtagcagcagctcctgcttgagttctgagggcatcatggccctatgattaaccagagtgatctaacctagactaaaattgggaacttatttgcaatttttgaccctgaccactaactagtgattcttctccaaaattgagaaagacagcacccattgaagcagatatgtgtgtgaaagtatatttttcaattccagatttttaattttaaggctccaggaaagaaaggagagtagaacatttttcctcattttatcaaatcctctcttgccctccctcaattcccctgtaacattcctgaagctgttcccactcccagatggttttatcaatagcctagaggtaaagaactgtctttttctctgattctttaataaattatctttatagaatatgcacaagtttttctacactcagtgttaaagtatttattaatgggaagtcaacttaatgttttgaaataaatatatgactctgtttaatgcaaaaaaaaaaaaaaa

SEQ ID NO: 973 - protein, 350 aa, Homo Sapiens
MEPKRIREGYLVKKGSVFNTWKPMWVVLLEDGIEFYKKKSDNSPKGMIPLKGSTLTSPCQDFGKRMFVFKITTTKQQDHFFQAAFLEERDAWVRDIKKAIKCIEGGQKFARKSTRRSIRLPETIDLGALYLSMKDTEKGIKELNLEKDKKIFNHCFTGNCVIDWLVSNQSVRNRQEGLMIASSLLNEGYLQPAGDMSKSAVDGTAENPFLDNPDAFYYFPDSGFFCEENSSDDDVILKEEFRGVIIKQGCLLKQGHRRKNWKVRKFILREDPAYLHYYDPAGAEDPLGAIHLRGCVVTSVESNSNGRKSEEENLFEIITADEVHYFLQAATPKERTEWIRAIQMASRTGK

SEQ ID NO: 974 - DNA, 2114 bp, Homo Sapiens
gagagatgtgggttacaaagctgccatctagaggctagaggctcctttctgcagtgtatataatgcaagtctgcagccagcagagctcacagttgttgcaaagtgctcagcactaagggagccagcgcacagcacagccaggaaggcgagcgagcccagccagcccagccagcccagccagcccggaggtcatttgattgcccgcctcagaacgatggatctgcatctcttcgactactcagagccagggaacttctcggacatcagctggccatgcaacagcagcgactgcatcgtggtggacacggtgatgtgtcccaacatgcccaacaaaagcgtcctgctctacacgctctccttcatttacattttcatcttcgtcatcggcatgattgccaactccgtggtggtctgggtgaatatccaggccaagaccacaggctatgacacgcactgctacatcttgaacctggccattgccgacctgtgggttgtcctcaccatcccagtctgggtggtcagtctcgtgcagcacaaccagtggcccatgggcgagctcacgtgcaaagtcacacacctcatcttctccatcaacctcttcggcagcattttcttcctcacgtgcatgagcgtggaccgctacctctccatcacctacttcaccaacacccccagcagcaggaagaagatggtacgccgtgtcgtctgcatcctggtgtggctgctggccttctgcgtgtctctgcctgacacctactacctgaagaccgtcacgtctgcgtccaacaatgagacctactgccggtccttctaccccgagcacagcatcaaggagtggctgatcggcatggagctggtctccgttgtcttgggctttgccgttcccttctccattatcgctgtcttctacttcctgctggccagagccatctcggcgtccagtgaccaggagaagcacagcagccggaagatcatcttctcctacgtggtggtcttccttgtctgctggctgccctaccacgtggcggtgctgctggacatcttctccatcctgcactacatccctttcacctgccggctggagcacgccctcttcacggccctgcatgtcacacagtgcctgtcgctggtgcactgctgcgtcaaccctgtcctctacagcttcatcaatcgcaactacaggtacgagctgatgaaggccttcatcttcaagtactcggccaaaacagggctcaccaagctcatcgatgcctccagagtctcagagacggagtactctgccttggagcagagcaccaaatgatctgccctggagaggctctgggacgggtttacttgtttttgaacagggtgatgggccctatggttttctagagcaaagcaaagtagcttcgggtcttgatgcttgagtagagtgaagaggggagcacgtgccccctgcatccattctctctttctcttgatgacgcagctgtcatttggctgtgcgtgctgacagttttgcaacaggcagagctgtgtcgcacagcagtgctgtgcgtcagagccagctgaggacaggcttgcctggacttctgtaagataggattttctgtgtttcctgaattttttatatggtgatttgtatttaaattttaagactttattttctcactattggtgtaccttataaatgtatttgaaagttaaatatattttaaatattgtttgggaggcatagtgctgacatatattcagagtgttgtagttttaaggttagcgtgacttcagttttgactaaggatgacactaattgttagctgttttgaaattatatatatataaatatatataaatatataaatatatgccagtcttggctgaaatgttttatttaccatagttttatatctgtgtggtgttttgtaccggcacgggatatggaacgaaaactgctttgtaatgcagtttgtgacattaatagtattgtaaagttacattttaaaataaacaaaaaactgttctggactgcaaatctgcacacacaacgaacagttgcatttcagagagttctctcaatttgtaagttatttttttttaataaagatttttgtttcctaaaaaaaaaaaaaaaa

SEQ ID NO: 975 - protein, 362 aa, Homo Sapiens
MDLHLFDYSEPGNFSDISWPCNSSDCIVVDTVMCPNMPNKSVLLYTLSFIYIFIFVIGMIANSVVVWVNIQAKTTGYDTHCYILNLAIADLWVVLTIPVWVVSLVQHNQWPMGELTCKVTHLIFSINLFGSIFFLTCMSVDRYLSITYFTNTPSSRKKMVRRVVCILVWLLAFCVSLPDTYYLKTVTSASNNETYCRSFYPEHSIKEWLIGMELVSVVLGFAVPFSIIAVFYFLLARAISASSDQEKHSSRKIIFSYVVVFLVCWLPYHVAVLLDIFSILHYIPFTCRLEHALFTALHVTQCLSLVHCCVNPVLYSFINRNYRYELMKAFIFKYSAKTGLTKLIDASRVSETEYSALEQSTK

SEQ ID NO: 976 - DNA, 1570 bp, Homo Sapiens
gccgagccagccccttcaccaccagccggccgcgccccgggaagggaagtttgtggcggaggaggttcgtacgggaggagggggaggcgcccacgcatctggggctgactcgctctttcgcaaaacgtctgggaggagtccctggggccacaaaactgcctccttcctgaggccagaaggagagaagacgtgcagggaccccgcgcacaggagctgccctcgcgacatgggtcacccgccgctgctgccgctgctgctgctgctccacacctgcgtcccagcctcttggggcctgcggtgcatgcagtgtaagaccaacggggattgccgtgtggaagagtgcgccctgggacaggacctctgcaggaccacgatcgtgcgcttgtgggaagaaggagaagagctggagctggtggagaaaagctgtacccactcagagaagaccaacaggaccctgagctatcggactggcttgaagatcaccagccttaccgaggttgtgtgtgggttagacttgtgcaaccagggcaactctggccgggctgtcacctattcccgaagccgttacctcgaatgcatttcctgtggctcatcagacatgagctgtgagaggggccggcaccagagcctgcagtgccgcagccctgaagaacagtgcctggatgtggtgacccactggatccaggaaggtgaagaagggcgtccaaaggatgaccgccacctccgtggctgtggctaccttcccggctgcccgggctccaatggtttccacaacaacgacaccttccacttcctgaaatgctgcaacaccaccaaatgcaacgagggcccaatcctggagcttgaaaatctgccgcagaatggccgccagtgttacagctgcaaggggaacagcacccatggatgctcctctgaagagactttcctcattgactgccgaggccccatgaatcaatgtctggtagccaccggcactcacgaaccgaaaaaccaaagctatatggtaagaggctgtgcaaccgcctcaatgtgccaacatgcccacctgggtgacgccttcagcatgaaccacattgatgtctcctgctgtactaaaagtggctgtaaccacccagacctggatgtccagtaccgcagtggggctgctcctcagcctggccctgcccatctcagcctcaccatcaccctgctaatgactgccagactgtggggaggcactctcctctggacctaaacctgaaatccccctctctgccctggctggatccgggggacccctttgcccttccctcggctcccagccctacagacttgctgtgtgacctcaggccagtgtgccgacctctctgggcctcagttttcccagctatgaaaacagctatctcacaaagttgtgtgaagcagaagagaaaagctggaggaaggccgtgggccaatgggagagctcttgttattattaatattgttgccgctgttgtgttgttgttattaattaatattcatattatttattttatacttacataaagattttgtaccagtggacaaggccaaaaaaaaaaaaaaaaaa

SEQ ID NO: 977 - protein, 335 aa, Homo Sapiens
MGHPPLLPLLLLLHTCVPASWGLRCMQCKTNGDCRVEECALGQDLCRTTIVRLWEEGEELELVEKSCTHSEKTNRTLSYRTGLKITSLTEVVCGLDLCNQGNSGRAVTYSRSRYLECISCGSSDMSCERGRHQSLQCRSPEEQCLDVVTHWIQEGEEGRPKDDRHLRGCGYLPGCPGSNGFHNNDTFHFLKCCNTTKCNEGPILELENLPQNGRQCYSCKGNSTHGCSSEETFLIDCRGPMNQCLVATGTHEPKNQSYMVRGCATASMCQHAHLGDAFSMNHIDVSCCTKSGCNHPDLDVQYRSGAAPQPGPAHLSLTITLLMTARLWGGTLLWT

SEQ ID NO: 978 - DNA, 2611 bp, Homo Sapiens
aactgagtggctgtgaaagggtggggtttgctcagactgtccttcctctctggactgtaagaatatgtctccagggccagtgtctgctgcgatcgagtcccaccttccaagtcctggcatctcaatgcatctgggaagctacctgcattaagtcaggactgagcacacaggtgaactccagaaagaagaagctatggccgcagtgattctggagagcatctttctgaagcgatcccaacagaaaaagaaaacatcacctctaaacttcaagaagcgcctgtttctcttgaccgtgcacaaactctcctactatgagtatgactttgaacgtgggagaagaggcagtaagaagggttcaatagatgttgagaagatcacttgtgttgaaacagtggttcctgaaaaaaatcctcctccagaaagacagattccgagaagaggtgaagagtccagtgaaatggagcaaatttcaatcattgaaaggttcccttatcccttccaggttgtatatgatgaagggcctctctacgtcttctccccaactgaagaactaaggaagcggtggattcaccagctcaaaaacgtaatccggtacaacagtgatctggttcagaaatatcacccttgcttctggatcgatgggcagtatctctgctgctctcagacagccaaaaatgctatgggctgccaaattttggagaacaggaatggaagcttaaaacctgggagttctcaccggaagacaaaaaagcctcttcccccaacgcctgaggaggaccagatcttgaaaaagccactaccgcctgagccagcagcagcaccagtctccacaagtgagctgaaaaaggttgtggccctttatgattacatgccaatgaatgcaaatgatctacagctgcggaagggtgatgaatattttatcttggaggaaagcaacttaccatggtggagagcacgagataaaaatgggcaggaaggctacattcctagtaactatgtcactgaagcagaagactccatagaaatgtatgagtggtattccaaacacatgactcggagtcaggctgagcaactgctaaagcaagaggggaaagaaggaggtttcattgtcagagactccagcaaagctggcaaatatacagtgtctgtgtttgctaaatccacaggggaccctcaaggggtgatacgtcattatgttgtgtgttccacacctcagagccagtattacctggctgagaagcaccttttcagcaccatccctgagctcattaactaccatcagcacaactctgcaggactcatatccaggctcaaatatccagtgtctcaacaaaacaagaatgcaccttccactgcaggcctgggatacggatcatgggaaattgatccaaaggacctgaccttcttgaaggagctggggactggacaatttggggtagtgaagtatgggaaatggagaggccagtacgacgtggccatcaagatgatcaaagaaggctccatgtctgaagatgaattcattgaagaagccaaagtcatgatgaatctttcccatgagaagctggtgcagttgtatggcgtctgcaccaagcagcgccccatcttcatcatcactgagtacatggccaatggctgcctcctgaactacctgagggagatgcgccaccgcttccagactcagcagctgctagagatgtgcaaggatgtctgtgaagccatggaatacctggagtcaaagcagttccttcaccgagacctggcagctcgaaactgtttggtaaacgatcaaggagttgttaaagtatctgatttcggcctgtccaggtatgtcctggatgatgaatacacaagctcagtaggctccaaatttccagtccggtggtccccaccggaagtcctgatgtatagcaagttcagcagcaaatctgacatttgggcttttggggttttgatgtgggaaatttactccctggggaagatgccatatgagagatttactaacagtgagactgctgaacacattgcccaaggcctacgtctctacaggcctcatctggcttcagagaaggtatataccatcatgtacagttgctggcatgagaaagcagatgagcgtcccactttcaaaattcttctgagcaatattctagatgtcatggatgaagaatcctgagctcgccaataagcttcttggttctacttctcttctccacaagccccaatttcactttctcagaggaaatcccaagcttaggagccctggagcctttgtgctcccactcaatacaaaaaggcccctctctacatctgggaatgcacctcttctttgattccctgggatagtggcttctgagcaaaggccaagaaattattgtgcctgaaatttcccgagagaattaagacagactgaatttgcgatgaaaatattttttaggagggaggatgtaaatagccgcacaaaggggtccaacagctctttgagtaggcatttggtagagcttgggggtgtgtgtgtgggggtggaccgaatttggcaagaatgaaatggtgtcataaagatgggaggggagggtgttttgataaaataaaattactagaaagcttgaaagtc

SEQ ID NO: 979 - protein, 659 aa, Homo Sapiens
MAAVILESIFLKRSQQKKKTSPLNFKKRLFLLTVHKLSYYEYDFERGRRGSKKGSIDVEKITCVETVVPEKNPPPERQIPRRGEESSEMEQISIIERFPYPFQVVYDEGPLYVFSPTEELRKRWIHQLKNVIRYNSDLVQKYHPCFWIDGQYLCCSQTAKNAMGCQILENRNGSLKPGSSHRKTKKPLPPTPEEDQILKKPLPPEPAAAPVSTSELKKVVALYDYMPMNANDLQLRKGDEYFILEESNLPWWRARDKNGQEGYIPSNYVTEAEDSIEMYEWYSKHMTRSQAEQLLKQEGKEGGFIVRDSSKAGKYTVSVFAKSTGDPQGVIRHYVVCSTPQSQYYLAEKHLFSTIPELINYHQHNSAGLISRLKYPVSQQNKNAPSTAGLGYGSWEIDPKDLTFLKELGTGQFGVVKYGKWRGQYDVAIKMIKEGSMSEDEFIEEAKVMMNLSHEKLVQLYGVCTKQRPIFIITEYMANGCLLNYLREMRHRFQTQQLLEMCKDVCEAMEYLESKQFLHRDLAARNCLVNDQGVVKVSDFGLSRYVLDDEYTSSVGSKFPVRWSPPEVLMYSKFSSKSDIWAFGVLMWEIYSLGKMPYERFTNSETAEHIAQGLRLYRPHLASEKVYTIMYSCWHEKADERPTFKILLSNILDVMDEES

SEQ ID NO: 980 - DNA, 5155 bp, Homo Sapiens
gtggttgttcctcccctaaagcacagcataaatttggagagatgcatctaaactgcgtgtgggttcgggctcttttaggtgaatagggctcggcggatcgacttcctcgattatctccgtgccctggacccgccccctccgcctggcgccaggccgccgagcgccgatcggctcgatgagcggaggcgctgctgcggcgctgcggccgacgccgggtccgcaccaactgtctccccctcccagcttcttacctcggcttcctactccttcccccgcccgcccagcaccgccagcccgggagagctgccgggagttccccgggagcctcaggtggtgactatcctgttgagaagcaaaagatactttgcaagtaaaaaatatgcctcccaagtttaagcgccacctcaatgatgatgatgtcacaggttctgtgaaaagtgaaaggagaaatcttttggaagatgattcagatgaagaagaggacttttttctaaggggaccatctggaccaagatttggacctagaaatgataaaattaagcatgttcagaatcaagtggatgaagttattgatgtcatgcaagaaaatattacaaaggtaattgagagaggggagagactagatgaactacaggacaaatcagaaagcttatcggataatgcaacagcttttagcaacagatccaaacaacttcgaaggcaaatgtggtggcgtggatgcaaaataaaagccatcatggctttggttgctgctatccttttgctagtgattatcattcttatagtcatgaaataccgtacttgatttgatgacagagatcttcattaaacaagatctgggacagtaataaaagattgctgcataatttaaatgaaacctatgtgtatataactttcaaaacttctttttcaagaaactaagaggcaagtatcacttcaaattggaacgttgagaatgtccaattatcttctccctttctaacaaaatgttcttttaataattatgtttaaggcaaagagaactagcctctatttttccatatttcaaggatctaatttgaaactagatacttgccagttcattatttgtgtatataaacactgattataatatttcatattaatattttaatggcataaggacttgcattattgcattagggagcgggtcatgctgggggtcaggaagcctgtgtagagtaccaaattatatgctgaaagagatgcataaccattctgtcaatatttgcagaaatatagttcctttcatattacagttgttttgcaagcaatttccacatttataggtgtaacaaaagctaaatgttgtaaatgttgttgccctcaggtataactaaaaacattccagtaaatatatttttgactgtgtaagagaatgtgtagtaatttttttggcattggattatggaaatggaaatttttaaacagtgtgaaaaaacatggtatggcatcataaaactggagataataaagttattgaagagtgtcattggagtatttgaaaatgaccaatatatagctgccagtcatggtccagtctgttttctgttaaactccaataaagagagaccagtcagtcctaatgtgagtaaatgaaatttacaggtaacttacttactccttaattttattttagttaatagcctctaacttccaactatctcatttaccaaaagtacaaaaagtagcaaaaccatctattaatactttgaattttatatctttgcatttcctgttcatccttgaggagatgtatgttgcacaatcaaattttgcatcagccaacagtaatgagtagtagaaagtcaggaacctatgtgtatatatatatatatatatatatatatatatatatatatatatacacacaaacacacacacacacacacacacacacgcacacatatgataatcagtcagtcggtaaccaaatgctagagagtgaccattaacctaagcctgtttttataatgaaaaaatgtgttaactttaaaatatgccaacctccttgtgtcttttaaacaagtcagagtgaaaatacattgtcccctaaggtgtggggagaggaagctttataataaaattagtgattctgcagaaacttgtgcactggatatcttgacaatatgaatataaaactccctaaattaaaaatagggttaatagaaattatcagtatttaaatagggaaaaatgattttatgtttattttatttaggttttatttctttggtcatcttaatgcaaaatgaataaagcatagaatctgggtttggtgtttttttgtctgtttttaaaattctacaggattattactaggaggcaaaaaatgctgtttagaatggaaaaaatttgaagagagaaagcagactgagacactcaagacacctgcaagttatctaagaagatctaaatagaattactaaattttatagtttgcttagagcatttagaaggagataaaggtcttacatactatagtgtatattgtctttggtctctatgctctttgtaaatgtcaattaatataaacagcatctgaacagctaataaatcttttaagttaagatacccagaaaaatgagcatttttagaatttcagtagctaataattcaggaatggaaatattttaactgaatggacagaatcagtcctaacatttgtatgtatgtcctttatttgaattggaactaggctcataagtggttaattttccattagttgatgtagaaatctggtttctccataatatctacaagtgaagatgaagattacttctcaaaaagtatccatatttccagtgttccttttaataaaatatgccacttttaaataaataattacaaaatgtaaaattataaaatttttaaatttaaataataagtaacagtaaaattttttgacaatatatatgtcactgtctttgtaatttaaacatattgctgcctgggatatgggtaacagaattatcactcatggaactttgtagtagtgatggcttggtttgtaattcatcatttcatctttcttggtcttgattaatcctgaaatccttaaaatggctggcatggttatgactttattgtggtaaccttggagatataagccctcttacgatcaaaaacagaagaaaaaaatatattgttcaaactgatgccaggcctacctttattccctcccttaattactttttttctcattcagctcagatcatcctgcacttgaaaaatgaagttttaccaccatcaaaactatcattatttaacaacaagtgaagatcaacagaaaaattcaagtagctttgcaaatactagttgatactcagtgaaatcacgtcactattttgatgcctgaatccatacctttgtgatttatgtttaattacagaagcctattgccttgcagcaattttgttgttataatactgattaattggttactccttcttattataactcagtaatacctgtggtcatttggttcctctatcctgacaaagttcactggaaattgccctcagattttataaactgggggatttcttaattagataaaagttcattactgaagatggaatattatataagatggaggaagggtaattaatagacatgagatatagaaatactttgttagccctgctatagattgcctattgtagtctttctgtgcatttcaatagtctgtattaggaaattataacttcagcacttttgatagcaaaaattggcatctttcaattctgtatagtatgtgactatcctgtaaatgataatatgtgtacagactgagaaggcaggaatataaagtaattgaaatctctcattgccggtatactctaaaacatgcttgatgccttgtcagcatcattgcacacattgactctgtatttacatctgtatatacactatgattagaaaatatgcaagaaattgtttttccatgttaagaacaaatgccattagaagatgtccccttaattgtattgtcagagtattactatgtcaaggatgactgttctgttaacctaattttgtgttttcacatggaaatgtgattggactccatttttctgtgagttgagagtaagagcataagtcagtttgaaagcatttacaagtttgttttagaatgtagtaagggctgaaaggtgctctacttcttaacttgttttttccatgttgtagacaaatgaaatttgtctaaatgcttttgtctaaaaatgcatttgtctaaatgctttagattgatgtagggtttagatcctctttaatactttgagatagtcttattctgattttttttttcttctggaaaccaagtagaattagggatgggaatacaaatgcatttattctggcttctgttttattccaagaagcttcttggaacaaatcagtaggaattgaaaagaaagcatgaccaacccaattacaggggataaatgtaagcttgttaaagtaagcaccacaccatgtttctgtctccccagcacccagcacagtgctgtgaaccttggcagatgctagataaatgtgtgttgaatgaatgtgcctatgaagccacaaagatgccacatgttagtatatcagtgagaggtgactccacagtgctctctggagaagcaatatgagtgactgaagagtggggccttttgcttttgcctggatataggggtgctcttctactgtaattgggtgtggaaaaactctggctttatggtattccattaggttcttttcatttaaagtagtcttaaaatcaaagtatccaatattttaaagccacaaagtagattacataattagcagagattttagtcagtaaaatgttagaaatcaaactataagaaaattcaagtcctttattttgtgtcttgggtatatgtcattattttaaattccacactcccttatttaatcactttggtaagtgcctttgatgttttgaaatgtatagtgggagatgagcaaatgtaaatgtcatgtgccctgttccctagcttctcaattcctcataaccatttttaccagtgttgcaaagtttagacctttgtgttaatatcagaagtgtatttgtagcccctccatagtgaacaatgaaataaactatttcatagaaaacaaaaattaa

SEQ ID NO: 981 - protein, 141 aa, Homo Sapiens
MPPKFKRHLNDDDVTGSVKSERRNLLEDDSDEEEDFFLRGPSGPRFGPRNDKIKHVQNQVDEVIDVMQENITKVIERGERLDELQDKSESLSDNATAFSNRSKQLRRQMWWRGCKIKAIMALVAAILLLVIIILIVMKYRT

SEQ ID NO: 982 - DNA, 1956 bp, Homo Sapiens
cttctccctggtcaaccgctctgcaaacaaccatcaatctgatcccacaggcctgagaaagtctgctctccagtacctgctgctgatctgtttcagccgacaagaggcaccatgaaattggaattcacggagaaaaactacaatagcttcgtgctgcagaacctgaacagacagaggaaacgcaaagagtactgggacatggccctgagtgtggacaaccacgtcttctttgcacatcgcaatgtgctggctgctgtctccccactggtgaggagcctcatctccagcaatgacatgaagaccgctgatgagcttttcatcaccattgacaccagttacctgagcccggtcacagtggaccagcttctggactacttctatagcggcaaggtggtgatctccgagcaaaatgtggaggagctgcttcgtggggctcagtatttcaacacaccacgccttcgagttcactgtaacgacttccttattaagtccatctgccgtgccaactgcttgcgctacctcttcttggctgagctgtttgagctcaaagaggtatcagacgtagcttactctggcattcgggacaacttccactactgggccagtcctgagggctccatgcacttcatgcgctgtccacctgttatctttggccgcctgctccgtgatgaaaaccttcacgtgctcaatgaagaccaggcgctcagcgcactcatcaattgggtgtacttccggaaggaggatcgggagaagtatttcaagaagttcttcaattacatcaatctcaatgctgtctccaataagacgctggtgtttgccagcaacaagctggtgggcatggagaacacctcatcccatacaaccctgattgagagtgtcctgatggaccgcaagcaggagcggccatgcagcctgctggtctaccagcggaaaggggccctgcttgattccgtggtcatcctcggtggccagaaggcccacggccagttcaatgatggagtgtttgcttatatcatccaggagaacctgtggatgaagctctcagacatgccctatcgggcagcagcacttagtgccacctctgctggtcgctacatctacatctctggtggcaccactgagcagatttcagggctgaagacagcctggcggtatgacatggatgacaactcctggaccaagttgcctgacctgcccatcgggcttgtcttccacaccatggtgacctgtggggggacagtgtactcagtgggcgggagcattgccccaaggcggtatgtctccaacatctatcgctatgatgagcggaaggaagtctggtgcctggcaggaaagatgagcatccccatggatggcaccgccgtgatcactaaaggagacaggcatctgtacattgtcactggacggtgcttggtgaaaggttatatctcccgggtcggggtagtggactgctttgacaccagcactggggacgtggtccagtgtatcaccttccccattgagttcaaccatcggcccctgctctctttccaacaggacaacatcctctgcgtgcacagccaccggcagagtgtggaaatcaatctgcagaaggtgaaggcaagcaagacgaccacctcagtgcctgtcttgcccaacagctgccccttggatgtgtcccatgctatatgctccattggagacagcaaggtgtttgtatgtgggggtgtcaccactgccagcgatgtccagacaaaggactacaccatcaatccaaatgccttcttgctggaccaaaagacaggcaagtggaagaccctggctcctccaccagaggcactggactgtcctgcctgctgtctagccaagctaccttgcaagattcttcaaaggatttaaacattttaagtgggagaataagtaaatgcattattattcacgatttaatgagagaaagagaggaaaaaaaaaaaaaaa

SEQ ID NO: 983 - protein, 588 aa, Homo Sapiens
MKLEFTEKNYNSFVLQNLNRQRKRKEYWDMALSVDNHVFFAHRNVLAAVSPLVRSLISSNDMKTADELFITIDTSYLSPVTVDQLLDYFYSGKVVISEQNVEELLRGAQYFNTPRLRVHCNDFLIKSICRANCLRYLFLAELFELKEVSDVAYSGIRDNFHYWASPEGSMHFMRCPPVIFGRLLRDENLHVLNEDQALSALINWVYFRKEDREKYFKKFFNYINLNAVSNKTLVFASNKLVGMENTSSHTTLIESVLMDRKQERPCSLLVYQRKGALLDSVVILGGQKAHGQFNDGVFAYIIQENLWMKLSDMPYRAAALSATSAGRYIYISGGTTEQISGLKTAWRYDMDDNSWTKLPDLPIGLVFHTMVTCGGTVYSVGGSIAPRRYVSNIYRYDERKEVWCLAGKMSIPMDGTAVITKGDRHLYIVTGRCLVKGYISRVGVVDCFDTSTGDVVQCITFPIEFNHRPLLSFQQDNILCVHSHRQSVEINLQKVKASKTTTSVPVLPNSCPLDVSHAICSIGDSKVFVCGGVTTASDVQTKDYTINPNAFLLDQKTGKWKTLAPPPEALDCPACCLAKLPCKILQRI

SEQ ID NO: 984 - DNA, 3809 bp, Homo Sapiens
tctgccccttccccccgcccccgcccgcctcggctcccgcagcgctagtgtgtccgcctagttcagtgtgcgtggagattaggtccaagcgcccgcccagaggcaggcagtccgcgagcccagccgccgctgtcgccgccagtagcagccttcgccagcagcgccgcggcggaaccgggcgcaggggagcgagcccggccccgccagcccagcccagcccagccctactccctccccacgccagggcagcagccgttgctcagagagaaggtggaggaagaaatccagaccctagcacgcgcgcaccatcatggaccattatgattctcagcaaaccaacgattacatgcagccagaagaggactgggaccgggacctgctcctggacccggcctgggagaagcagcagagaaagacattcacggcatggtgtaactcccacctccggaaggcggggacacagatcgagaacatcgaagaggacttccgggatggcctgaagctcatgctgctgctggaggtcatctcaggtgaacgcttggccaagccagagcgaggcaagatgagagtgcacaagatctccaacgtcaacaaggccctggatttcatagccagcaaaggcgtcaaactggtgtccatcggagccgaagaaatcgtggatgggaatgtgaagatgaccctgggcatgatctggaccatcatcctgcgctttgccatccaggacatctccgtggaagagacttcagccaaggaagggctgctcctgtggtgtcagagaaagacagccccttacaaaaatgtcaacatccagaacttccacataagctggaaggatggcctcggcttctgtgctttgatccaccgacaccggcccgagctgattgactacgggaagctgcggaaggatgatccactcacaaatctgaatacggcttttgacgtggcagagaagtacctggacatccccaagatgctggatgccgaagacatcgttggaactgcccgaccggatgagaaagccatcatgacttacgtgtctagcttctaccacgccttctctggagcccagaaggcggagacagcagccaatcgcatctgcaaggtgttggccgtcaaccaggagaacgagcagcttatggaagactacgagaagctggccagtgatctgttggagtggatccgccgcacaatcccgtggctggagaaccgggtgcccgagaacaccatgcatgccatgcaacagaagctggaggacttccgggactaccggcgcctgcacaagccgcccaaggtgcaggagaagtgccagctggagatcaacttcaacacgctgcagaccaagctgcggctcagcaaccggcctgccttcatgccctctgagggcaggatggtctcggacatcaacaatgcctggggctgcctggagcaggtggagaagggctatgaggagtggttgctgaatgagatccggaggctggagcgactggaccacctggcagagaagttccggcagaaggcctccatccacgaggcctggactgacggcaaagaggccatgctgcgacagaaggactatgagaccgccaccctctcggagatcaaggccctgctcaagaagcatgaggccttcgagagtgacctggctgcccaccaggaccgtgtggagcagattgccgccatcgcacaggagctcaatgagctggactattatgactcacccagtgtcaacgcccgttgccaaaagatctgtgaccagtgggacaatctgggggccctaactcagaagcgaagggaagctctggagcggaccgagaaactgctggagaccattgaccagctgtacttggagtatgccaagcgggctgcacccttcaacaactggatggagggggccatggaggacctgcaggacaccttcattgtgcacaccattgaggagatccagggactgaccacagcccatgagcagttcaaggccaccctccctgatgccgacaaggagcgcctggccatcctgggcatccacaatgaggtgtccaagattgtccagacctaccacgtcaatatggcgggcaccaacccctacacaaccatcacgcctcaggagatcaatggcaaatgggaccacgtgcggcagctggtgcctcggagggaccaagctctgacggaggagcatgcccgacagcagcacaatgagaggctacgcaagcagtttggagcccaggccaatgtcatcgggccctggatccagaccaagatggaggagatcgggaggatctccattgagatgcatgggaccctggaggaccagctcagccacctgcggcagtatgagaagagcatcgtcaactacaagccaaagattgatcagctggagggcgaccaccagctcatccaggaggcgctcatcttcgacaacaagcacaccaactacaccatggagcacatccgtgtgggctgggagcagctgctcaccaccatcgccaggaccatcaatgaggtagagaaccagatcctgacccgggatgccaagggcatcagccaggagcagatgaatgagttccgggcctccttcaaccactttgaccgggatcactccggcacactgggtcccgaggagttcaaagcctgcctcatcagcttgggttatgatattggcaacgacccccagaagaagacaggcatgatggacacggatgatttccgcgcctgcctgatctccatgggttacaacatgggagaagcagaatttgcccgcatcatgagcattgtggaccccaaccgcctgggggtagtgacattccaggccttcattgacttcatgtcccgcgagacagccgacacagatacagcagaccaagtcatggcttccttcaagatcctggctggggacaagaactacattaccatggacgagctgcgccgcgagctgccacccgaccaggctgagtactgcatcgcgcggatggccccctacaccggccccgactccgtgccaggtgctctggactacatgtccttctccacggcgctgtacggcgagagtgacctctaatccaccccgcccggccgccctcgtcttgtgcgccgtgccctgccttgcacctccgccgtcgcccatctcctgcctgggttcggtttcagctcccagcctccacccgggtgagctggggcccacgtggcatcgatcctccctgcccgcgaagtgacagtttacaaaattattttctgcaaaaaagaaaaaaaagttacgttaaaaaccaaaaaactacatattttattatagaaaaagtattttttctccaccagacaaatggaaaaaaagaggaaagattaactatttgcaccgaaatgtcttgttttgttgcgacataggaaaataaccaagcacaaagttatattccatcctttttactgatttttttttcttctatctgttccatctgctgtattcatttctccaatctcatgtccattttggtgtgggagtcggggtagggggtactcttgtcaaaaggcacattggtgcatgtgtgtttgctagctcacttgtccatgaaaatattttatgatattaaagaaaatcttttgaaatggctgttttttaaggaagagaatttatgtggcttctcatttttaaatcccctcagaggtgtgactagtctctttatcagcacacacttaaaaaatttttaatattgtctattaaaaataggacaaacttggagagtatggacaactttgatattgcttggcacagatggtattaaaaaaaccacactcctatgacaaaaaaaaaaaaaaaaaaa

SEQ ID NO: 985 - protein, 914 aa, Homo Sapiens
MDHYDSQQTNDYMQPEEDWDRDLLLDPAWEKQQRKTFTAWCNSHLRKAGTQIENIEEDFRDGLKLMLLLEVISGERLAKPERGKMRVHKISNVNKALDFIASKGVKLVSIGAEEIVDGNVKMTLGMIWTIILRFAIQDISVEETSAKEGLLLWCQRKTAPYKNVNIQNFHISWKDGLGFCALIHRHRPELIDYGKLRKDDPLTNLNTAFDVAEKYLDIPKMLDAEDIVGTARPDEKAIMTYVSSFYHAFSGAQKAETAANRICKVLAVNQENEQLMEDYEKLASDLLEWIRRTIPWLENRVPENTMHAMQQKLEDFRDYRRLHKPPKVQEKCQLEINFNTLQTKLRLSNRPAFMPSEGRMVSDINNAWGCLEQVEKGYEEWLLNEIRRLERLDHLAEKFRQKASIHEAWTDGKEAMLRQKDYETATLSEIKALLKKHEAFESDLAAHQDRVEQIAAIAQELNELDYYDSPSVNARCQKICDQWDNLGALTQKRREALERTEKLLETIDQLYLEYAKRAAPFNNWMEGAMEDLQDTFIVHTIEEIQGLTTAHEQFKATLPDADKERLAILGIHNEVSKIVQTYHVNMAGTNPYTTITPQEINGKWDHVRQLVPRRDQALTEEHARQQHNERLRKQFGAQANVIGPWIQTKMEEIGRISIEMHGTLEDQLSHLRQYEKSIVNYKPKIDQLEGDHQLIQEALIFDNKHTNYTMEHIRVGWEQLLTTIARTINEVENQILTRDAKGISQEQMNEFRASFNHFDRDHSGTLGPEEFKACLISLGYDIGNDPQKKTGMMDTDDFRACLISMGYNMGEAEFARIMSIVDPNRLGVVTFQAFIDFMSRETADTDTADQVMASFKILAGDKNYITMDELRRELPPDQAEYCIARMAPYTGPDSVPGALDYMSFSTALYGESDL

SEQ ID NO: 986 - DNA, 2665 bp, Homo Sapiens
aatcgctgacatcatccgggggcgggcgcccctgccctgcgggtgactccgacccctggctagagggtaggcggcgtggagcagcgcgcgcaagcgaggccaggggaaggtgggcgcaggtgaggggccgaggtgtgcgcaggactttagccggttgagaaggatcaagcaggcatttggagcacaggtgtctagaaacttttaaggggccggttcaagaaggaaaagttcccttctgctgtgaaactatttggcaagaggctggagggcccaatggctgcaaaatcgcaacccaacattcccaaagccaagagtctagatggcgtcaccaatgacagaaccgcatctcaagggcagtggggccgtgcctgggaggtggactggttttcactggcgagcgtcatcttcctactgctgttcgcccccttcatcgtctactacttcatcatggcttgtgaccagtacagctgcgccctgactggccctgtggtggacatcgtcaccggacatgctcggctctcggacatctgggccaagactccacctataacgaggaaagccgcccagctctataccttgtgggtcaccttccaggtgcttctgtacacgtctctccctgacttctgccataagtttctacccggctacgtaggaggcatccaggagggggccgtgactcctgcaggggttgtgaacaagtatcagatcaatggcctgcaagcctggctcctcacgcacctgctctggtttgcaaacgctcatctcctgtcctggttctcgcccaccatcatcttcgacaactggatcccactgctgtggtgcgccaacatccttggctatgccgtctccaccttcgccatggtcaagggctacttcttccccaccagcgccagagactgcaaattcacaggcaatttcttttacaactacatgatgggcatcgagtttaaccctcggatcgggaagtggtttgacttcaagctgttcttcaatgggcgccccgggatcgtcgcctggaccctcatcaacctgtccttcgcagcgaagcagcgggagctccacagccatgtgaccaatgccatggtcctggtcaacgtcctgcaggccatctacgtgattgacttcttctggaacgaaacctggtacctgaagaccattgacatctgccatgaccacttcgggtggtacctgggctggggcgactgtgtctggctgccttatctttacacgctgcagggtctgtacttggtgtaccaccccgtgcagctgtccaccccgcacgccgtgggcgtcctgctgctgggcctggtgggctactacatcttccgggtggccaaccaccagaaggacctgttccgccgcacggatgggcgctgcctcatctggggcaggaagcccaaggtcatcgagtgctcctacacatccgccgatgggcagaggcaccacagcaagctgctggtgtcgggcttctggggcgtggcccgccacttcaactacgtcggcgacctgatgggcagcctggcctactgcctggcctgtggcggcggccacctgctgccctacttctacatcatctacatggccatcctgctgacccaccgctgcctccgggacgagcaccgctgcgccagcaagtacggccgggactgggagcgctacaccgccgcagtgccttaccgcctgctgcctggaatcttctaagggcacgccctagggagaagccctgtggggctgtcaagagcgtgttctgccaggtccatgggggctggcatcccagctccaactcgaggagcctcagtttcctcatctgtaaactggagagagcccagcacttggcaggtgtccagtacctaatcacgctctgttccttgcttttgccttcaagggaattccgagtgtccagcactgccgtattgccagcacagacggattttctctaatcagtgtccctggggcaggaggatgacccagtcacctttactagtcctttggagacaatttacctgtattaggagcccaggccacgctacactctgcccacactggtgagcaggaggtcttcccacgccctgtcattaggctgcatttactcttgctaaataaaagtgggagtggggcgtgcgcgttatccatgtattgcctttcagctctagatccccctcccctgcctgctctgcagtcgtgggtggggcccgtgcgccgtttctccttggtagcgtgcacggtgttgaactgggacactggggagaaaggggctttcatgtcgtttccttcctgctcctgctgcacagctgccaggagtgctctgcctggagtctgcagacctcagagaggtcccagcaccggctgtggcctttcaggtgtaggcaggtgggctctgcttcccgattccctgtgagcgcccaccctctcgaaagaattttctgcttgccctatgactgtgcagactctggctcgagcaacccggggaacttcaccctcaggggcctcccacaccttctccagcgaggaggtctcagtcccagcctcgggagggcacctccttttctgtgctttcttccctgaggcattcttcctcatccctagggtgttgtgtagaactctttttaaactctatgctccgagtagagttcatctttatattaaacttcccctgttcaaataa

SEQ ID NO: 987 - protein, 475 aa, Homo Sapiens
MAAKSQPNIPKAKSLDGVTNDRTASQGQWGRAWEVDWFSLASVIFLLLFAPFIVYYFIMACDQYSCALTGPVVDIVTGHARLSDIWAKTPPITRKAAQLYTLWVTFQVLLYTSLPDFCHKFLPGYVGGIQEGAVTPAGVVNKYQINGLQAWLLTHLLWFANAHLLSWFSPTIIFDNWIPLLWCANILGYAVSTFAMVKGYFFPTSARDCKFTGNFFYNYMMGIEFNPRIGKWFDFKLFFNGRPGIVAWTLINLSFAAKQRELHSHVTNAMVLVNVLQAIYVIDFFWNETWYLKTIDICHDHFGWYLGWGDCVWLPYLYTLQGLYLVYHPVQLSTPHAVGVLLLGLVGYYIFRVANHQKDLFRRTDGRCLIWGRKPKVIECSYTSADGQRHHSKLLVSGFWGVARHFNYVGDLMGSLAYCLACGGGHLLPYFYIIYMAILLTHRCLRDEHRCASKYGRDWERYTAAVPYRLLPGIF

SEQ ID NO: 988 - DNA, 1912 bp, Homo Sapiens
cccaggcgccccggccttattccagcctggggagcgcctcggtggggagcacgggacagcgagggaggccgaggcgggggccctgggcgcccgatatctccgaaccggggaggcggccccgattccgagagccggaacgcagggaaaggcaaggacggggcggccggcggaggggcgggcgccgctcatcagccacgccagtcacgtctggggccaccggctgcctttttcttcctttccccctttgctttcttccccctccgctgttggcgagggcaaagtggccgtggcggcgccatgcccgggccggagtgagtgcgcgcgggcgaaaatggcgtacatccagttggaaccattaaacgagggttttctttctagaatctctggtctgctgctgtgcagatggacctgccggcactgctgtcagaagtgctacgagtccagctgttgccagtcaagtgaggatgaagttgaaattctgggacctttccctgctcagacccctccctggctgatggccagccggagcagtgacaaggatggtgactctgtccacacggccagcgaagtcccgctgaccccacggaccaattccccggatggaagacgctcgtcctcagacacatccaagtctacatacagcctgacgcggaggatttcgagtcttgagtcaagacgtcccagctctccactcatcgatattaaacccatcgagtttggcgttctcagcgccaagaaggagcccatccaaccttcggtgctcagacggacctataaccccgacgactatttcaggaagttcgaaccccacctgtactccctcgactccaacagcgacgatgtggactctctgacagacgaggagatcctgtccaagtaccagctgggcatgctgcacttcagcactcagtacgacctgctgcacaaccacctcaccgtgcgcgtgatcgaggccagggacctgccacctcccatctcccacgatggctcgcgccaggacatggcgcactccaacccctacgtcaagatctgtctcctgccagaccagaagaactcaaagcagaccggggtcaaacgcaagacccagaagcccgtgtttgaggagcgctacaccttcgagatccccttcctggaggcccagaggaggaccctgctcctgaccgtggtggattttgataagttctcccgccactgtgtcattgggaaagtttctgtgcctttgtgtgaagttgacctggtcaagggcgggcactggtggaaggcgctgattcccagttctcagaatgaagtggagctgggggagctgcttctgtcactgaattatctcccaagtgctggcagactgaatgttgatgtcattcgagccaagcaacttcttcagacagatgtgagccaaggttcagacccctttgtgaaaatccagctggtgcatggactcaaacttgtgaaaaccaagaagacgtccttcttaaggggcacaattgatcctttctacaatgaatccttcagcttcaaagttccccaagaagaactggaaaatgccagcctagtgtttacagttttcggccacaacatgaagagcagcaatgacttcatcgggaggatcgtcattggccagtactcttcaggcccctctgagaccaaccactggaggcgcatgctcaacacgcaccgcacagccgtggagcagtggcatagcctgaggtcccgagctgagtgtgaccgcgtgtctcctgcctccctggaggtgacctgagggctgcagggaaggcagctttcatttgtttaaaaaaaaaaaaaaaagacggaaaaaaatgtgtcacatactattacatccacacctgcatacacactcgcaacatgtctacacacgtccacacacacagacacacagataccccaaatcctctca

SEQ ID NO: 989 - protein, 474 aa, Homo Sapiens
MAYIQLEPLNEGFLSRISGLLLCRWTCRHCCQKCYESSCCQSSEDEVEILGPFPAQTPPWLMASRSSDKDGDSVHTASEVPLTPRTNSPDGRRSSSDTSKSTYSLTRRISSLESRRPSSPLIDIKPIEFGVLSAKKEPIQPSVLRRTYNPDDYFRKFEPHLYSLDSNSDDVDSLTDEEILSKYQLGMLHFSTQYDLLHNHLTVRVIEARDLPPPISHDGSRQDMAHSNPYVKICLLPDQKNSKQTGVKRKTQKPVFEERYTFEIPFLEAQRRTLLLTVVDFDKFSRHCVIGKVSVPLCEVDLVKGGHWWKALIPSSQNEVELGELLLSLNYLPSAGRLNVDVIRAKQLLQTDVSQGSDPFVKIQLVHGLKLVKTKKTSFLRGTIDPFYNESFSFKVPQEELENASLVFTVFGHNMKSSNDFIGRIVIGQYSSGPSETNHWRRMLNTHRTAVEQWHSLRSRAECDRVSPASLEVT

SEQ ID NO: 990 - DNA, 1180 bp, Homo Sapiens; identical to SEQ ID NO: 690

SEQ ID NO: 991 - protein, 308 aa, Homo Sapiens [sequence omitted]

SEQ ID NO: 992 - DNA, 2531 bp, Homo Sapiens
gtgcaaccttcctccctttcttaaatgcttggggtgagagagaagagaggctagggtggggcatggaggacacagagagagagagtgctgtgtattccttccccgctactgtcctgtcctcagctaacttgctctgggacagcttccccagggctacagatactgcactcagctgactgtcctttcttctgggcccctggtcccagagcagagctgacaaaggagattcctgagagagcaccttcttatcacagaaagtgctgagccaagagctcctagctgccccttttgcagatgtgaagggccagtgaaccttggacccagatggttgcttaatactcctttccccctccctcactccttcctttgcgggctgcctcacctcctccacccttcttgcttaaatccataggcatttgtctggccttcccttttactgctggctgggaaggaggagcatcagaccacagatcctggaaggcacttctctccctgactgctgctcacactgccgtgagaacctgcttatatccaggaccaaggaggcaatgccaggaagctggtgaagggtttcctctcctccaccatggttgacagcactgagtatgaagtggcctcccagcctgaggtggaaacctcccctttgggtgatggggccagcccagggccggagcaggtgaagctgaagaaggagatctcactgcttaacggcgtgtgcctgattgtggggaacatgatcggctcgggcatctttgtttcccccaagggtgtgctcatatacagtgcctcctttggtctctctctggtcatctgggctgtcgggggcctcttctccgtctttggggccctttgttatgcggaactgggcaccaccattaagaaatctggggccagctatgcctatatcctggaggcctttggaggattccttgctttcatcagactctggacctccctgctcatcattgagcccaccagccaggccatcattgccatcacctttgccaactacatggtacagcctctcttcccgagctgcttcgccccttatgctgccagccgcctgctggctgctgcctgcatttgtctcttaaccttcattaactgtgcctatgtcaaatggggaaccctggtacaagatattttcacctatgctaaagtattggcactgatcgcggtcatcgttgcaggcattgttagacttggccagggagcctctactcattttgagaattcctttgagggttcatcatttgcagtgggtgacattgccctggcactgtactcagctctgttctcctactcaggctgggacaccctcaactatgtcactgaagagatcaagaatcctgagaggaacctgcccctctccattggcatctccatgcccattgtcaccatcatctatatcttgaccaatgtggcctattatactgtgctagacatgagagacatcttggccagtgatgctgttgctgtgacttttgcagatcagatatttggaatatttaactggataattccactgtcagttgcattatcctgttttggtggcctcaatgcctccattgtggctgcttctaggcttttctttgtgggctcaagagaaggccatctccctgatgccatctgcatgatccatgttgagcggttcacaccagtgccttctctgctcttcaatggtatcatggcattgatctacttgtgcgtggaagacatcttccagctcattaactactacagcttcagctactggttctttgtggggctttctattgtgggtcagctttatctgcgctggaaggagcctgatcgacctcgtcccctcaagctcagcgttttcttcccgattgtcttctgcctctgcaccatcttcctggtggctgttccactttacagtgatactatcaactccctcatcggcattgccattgccctctcaggcctgcccttttacttcctcatcatcagagtgccagaacataagcgaccgctttacctccgaaggatcgtggggtctgccacaaggtacctccaggtcctgtgtatgtcagttgctgcagaaatggatttggaagatggaggagagatgcccaagcaacgggatcccaaatctaactaaacaccatctggaatcctgatgtggaaagcaggggtttctggtctactggctagagctaaggaagttgaaaaggaaagctcacttctttggaggcacctgtccagaagcctggcctaggcagcttcaacctttgaacttactttttgaaatgaaaagtaatttatttgttttgctacatactgttccagacttttaaaggggacaatgaaggtgactgtggggaggagcatgtcaggtttgggcttggttgttttagaagcacctgggtgtgcctacctactcctcttttcttttaaaagggcccacaatgctccaatttcctgtctcctttagagagacatgaaactatcacaggtgctggatgacaataaaagtttatgttcctaaaaaaaaaaaaaaaaaaaaaaaa

SEQ ID NO: 993 - protein, 511 aa, Homo Sapiens
MVDSTEYEVASQPEVETSPLGDGASPGPEQVKLKKEISLLNGVCLIVGNMIGSGIFVSPKGVLIYSASFGLSLVIWAVGGLFSVFGALCYAELGTTIKKSGASYAYILEAFGGFLAFIRLWTSLLIIEPTSQAIIAITFANYMVQPLFPSCFAPYAASRLLAAACICLLTFINCAYVKWGTLVQDIFTYAKVLALIAVIVAGIVRLGQGASTHFENSFEGSSFAVGDIALALYSALFSYSGWDTLNYVTEEIKNPERNLPLSIGISMPIVTIIYILTNVAYYTVLDMRDILASDAVAVTFADQIFGIFNWIIPLSVALSCFGGLNASIVAASRLFFVGSREGHLPDAICMIHVERFTPVPSLLFNGIMALIYLCVEDIFQLINYYSFSYWFFVGLSIVGQLYLRWKEPDRPRPLKLSVFFPIVFCLCTIFLVAVPLYSDTINSLIGIAIALSGLPFYFLIIRVPEHKRPLYLRRIVGSATRYLQVLCMSVAAEMDLEDGGEMPKQRDPKSN

SEQ ID NO: 994 - DNA, 464 bp, Homo Sapiens
ctccccagcctgataaaggtcctgcgggcaggacaggacctcccaaccaagccctccagcaaggattcagagtgcccctccggcctcgccatgaggctcttcctgtcgctcccggtcctggtggtggttctgtcgatcgtcttggaaggcccagccccagcccaggggaccccagacgtctccagtgccttggataagctgaaggagtttggaaacacactggaggacaaggctcgggaactcatcagccgcatcaaacagagtgaactttctgccaagatgcgggagtggttttcagagacatttcagaaagtgaaggagaaactcaagattgactcatgaggacctgaagggtgacatcccaggaggggcctctgaaatttcccacaccccagcgcctgtgctgaggactccctccatgtggccccaggtgccaccaataaaaatcctacagaaaattcaaa

SEQ ID NO: 995 - protein, 83 aa, Homo Sapiens
MRLFLSLPVLVVVLSIVLEGPAPAQGTPDVSSALDKLKEFGNTLEDKARELISRIKQSELSAKMREWFSETFQKVKEKLKIDS

SEQ ID NO: 996 - DNA, 2354 bp, Homo Sapiens
gtgacacgagggagcgcgaagcggagggcgcctcgcggcaggagcgggatttccggggtcacgggaaccggcaggggaacgggataaagttcccggagaaaggaaaggagagcgtgggatagtaaaagagaagacgcggagaagaggagaggacctacaagaacggaggacaggggcgcacgatggtcccggggggagcggaaacaaaggcacgcaaaacggaaaagcgtgtgtaggggagcggaaaaggaagtcaccaccgtggcctgcgacgaaatggcgaaaagtcttttgaagacagcctctctgtctggaaggacaaaattgctacatcaaacaggattgtcactttatagtacatcccatggattttatgaggaagaagtgaaaaaaacacttcagcagtttcctggtggatccattgaccttcagaaggaagacaatggcattggcattcttactctgaacaatccaagtagaatgaatgccttttcaggtgttatgatgctacaacttctggaaaaagtaattgaattggaaaattggacagaggggaaaggcctcattgtccgtggggcaaaaaatactttctcttcaggatctgatctgaatgctgtgaaatcactaggaactccagaggatggaatggccgtatgcatgttcatgcaaaacaccttaacaagatttatgagacttcctttaataagtgttgcgctggttcaaggttgggcattgggtggaggagcagaatttactacagcatgtgatttcaggttaatgactccagagagtaagatcagattcgtccacaaagagatgggcataataccaagctggggtggcaccacccggctagttgaaataatcggaagtagacaagctctcaaagtgttgagtggggcccttaaactggattcaaaaaatgctctaaacataggaatggttgaagaggtcttgcagtcttcagatgaaactaaatctctagaagaggcacaagaatggctaaagcaattcatccaagggccaccggaagtaattagagctttgaaaaaatctgtttgttcaggcagagagctatatttggaggaagcattacagaacgaaagagatcttttaggaacagtttggggtgggcctgcaaatttagaggctattgctaagaaaggaaaatttaataaataattggtttttcgtgtggatgtactccaagtaaagctccagtgactaatatgtataaatgttaaatgatattaaatatgaacatcagaattactttgaaggctactattaatatgcagacttacttttaatcatttgaatatctgaactcatttacctcatttcttgccaattactcacttgggtatttactgcgtaatctggaacatttagctaaaatatacacttttggcttaaaaattattgctgtcaattccaataataattcttagcttataaccaaagagcagtgtttaaaaggagagcttctatacaaaacctattcctggcgttacttttcatacaatttttgttctgttttacctggaaataatttaccaaaataactgagtgttgctgctaaagaacaaaagtggggaggtatcagggaacaagaaaacaagaaagggtatgatcaatcattttcttctgctccaaacagctggagtaaaattcatgggaaatggcccttcatttaaaaaaagatgtacctcactacccactacaaatttggaactttgttcttttcaataattagttttctattgtaaattacctactaaacagtggtagccatgacatggaaagtcaactgattctacaattggacattcatttgtgtgccctggaatttccaactagtaataaacaactactgttgatgtagttttaaaccacttgaagggactcatgaagcatcctgcaacataaatttgcatttttacatcagatttcttttttttcctgaaaaacaactaaccttctaacaactatctttcaaaagtaaatgtaataaaaatgcacaacataaaatgtttatgatcccagcaatacactttttaaaaaatgtgaaagtcaaagaattaagttctagttctgactcatcacaagaggtcaaaagtatttgctactgtaacattcaattcacatttgagaatcatggtaaaaataacttgcatttgccttaccatcatgatcctactgttgagttaggaaaatatggttagacagactcacattactttttttcagaggtaaactctagattactgtgtcaacccaatactatttggccatagatgtaaaaactaccaaataaaagtggattttgtggtctacaaaaaaaaaaaaaaaaa

SEQ ID NO: 997 - protein, 301 aa, Homo Sapiens
MAKSLLKTASLSGRTKLLHQTGLSLYSTSHGFYEEEVKKTLQQFPGGSIDLQKEDNGIGILTLNNPSRMNAFSGVMMLQLLEKVIELENWTEGKGLIVRGAKNTFSSGSDLNAVKSLGTPEDGMAVCMFMQNTLTRFMRLPLISVALVQGWALGGGAEFTTACDFRLMTPESKIRFVHKEMGIIPSWGGTTRLVEIIGSRQALKVLSGALKLDSKNALNIGMVEEVLQSSDETKSLEEAQEWLKQFIQGPPEVIRALKKSVCSGRELYLEEALQNERDLLGTVWGGPANLEAIAKKGKFNK

SEQ ID NO: 998 - DNA, 420 bp, Homo Sapiens
atggcggcgggcagctcgggcgccagcatgggctggcggggctcccctggacggccctcaggtcgctcacagcattgtcccaggacttcctcggcctgtgccaggtgggcaaggtacaggggtagcttccaaggcttctatcccaactctacctatttctacctattttctcttgagttattttgcctttatctcagttttatttgcaaaaatagtatacgcaaaatacatcgagtgaatgcacatcaggcatatagaagatctggcagaaacatgttttctcctgctcatttccagtcagtatttgaacacagaggcttccacggttttgattctttccacaaaaggttagttttgtctgttttcaccatttatgtaagtgaaactataaattatataatttttatgttcactcactaa

SEQ ID NO: 999 - DNA, 5341 bp, Homo Sapiens
agctagagccggttttgttcgccagcagatggcctgattcgacctctccaaaaatagacattttaactctctgaactcctgtttaaggaaggatgtaattcgctttgctctctcctcattttcaaggttcaaagggaagctgcgaggattccaaggtcccaccgccctcacagccaatgaggggcctgggagggaggagcttggtgcagcttgagcttctgagagaatcattcccggtagatgcagcggagtctgagctctgctgcatctgtcacagcagaacaaaattaaaaacacaacagtggaagagaaacgctgcagactatgggacgctgtaggactttctaaaacatttgctggggatttctgtgaagcatgatcttttaaaacgaattcttttggaagccggtttgggtaactgggaaaatgacacatatgctaaatgcagcagctgatcgagtgaaatggaccagatcgagtgctgctaagagggctgcctgcctggtggctgcggcatatgctctgaaaaccctctatcccatcattggcaagcgtttaaagcaatctggccacgggaagaaaaaagcagcagcttaccctgctgcagagaacacagaaatactgcattgcaccgagaccatttgtgaaaaaccttcgcctggagtgaatgcagatttcttcaaacagctactagaacttcggaaaattttgtttccaaaacttgtgaccactgaaacagggtggctctgcctgcactcagtggctctaatctcaagaacctttctttctatctatgtggctggtctggatggaaaaatcgtgaaaagcattgtggaaaagaagcctcggactttcatcatcaaattaatcaagtggcttatgattgccatccctgctaccttcgtcaacagtgcaataaggtacctggaatgcaaattggctttggccttcagaactcgcctagtagaccacgcctatgaaacctattttacaaatcagacttattataaagtgatcaatatggatgggaggctggcaaaccctgaccaatctcttacggaggatattatgatgttctcccaatctgtggctcacttgtattccaatctgaccaaacctattttagatgtaatgctgacctcctatacactcattcaaactgctacatccagaggagcaagcccaattgggcccaccctactagcaggacttgtggtgtatgccactgctaaagtgttaaaagcctgttctcccaaatttggcaaactggtggcagaggaagcacatagaaaaggctatttgcggtatgtgcactcgagaattatagccaatgtagaagaaattgccttttacagaggacataaggtagaaatgaaacaacttcagaaaagttacaaagctttagcagatcagatgaacctcattttatccaaacgtttgtggtacatcatgatagaacagttcctgatgaagtatgtttggagcagcagtggactaattatggtggctatacctattatcactgcaactggctttgcagatggtgaggatggccaaaagcaagttatggttagtgaacggacagaagcctttaccactgctcgaaatttactggcctctggagctgatgctattgaaaggattatgtcttcatacaaagaggtcactgaattagcaggctacactgctcgagtgtacaatatgttttgggtctttgatgaagtaaaaagaggcatttataagagaactgctgtcattcaagaatctgaaagccatagcaagaatggagctaaggtagaattacctctcagtgacacattggcaattaaaggaaaagttattgatgtggatcacggaattatttgtgaaaatgttcccataattacaccagcaggagaagtggtggcttccaggctaaacttcaaagtagaagaaggaatgcatcttttgataactggtcccaatggttgtgggaaaagttctctcttcagaattctaagtgggctctggcctgtgtatgaaggagtcctctataaaccacctcctcaacatatgttttatattccacaaaggccatatatgtctcttggaagtcttcgggatcaagtcatttaccctgattcagtggatgatatgcatgataaaggttatacagaccaagatctggaacgtatcctacacaatgtccatctctatcacatagttcaaagagaaggaggatgggatgctgttatggactggaaagatgtcctgtcaggaggggaaaagcaaagaatgggcatggctcgtatgttttatcataaaccaaaatatgccttgctggatgaatgtaccagtgctgtcagcattgatgtcgaaggaaagatatttcaggctgcaaaaggggctggaatttccttactgtctataacacacagaccttctctttggaaataccacacacatttattacagtttgatggtgaaggaggttggcgctttgaacaattggatactgctatccgtttgacattgagtgaagaaaaacaaaagctagaatctcagctagctggaattcccaaaatgcagcagagactcaatgaactatgtaaaattttgggagaagactcagtgctgaaaacaattaaaaatgaagatgagacatcttaatttgttttgacatattttaaaagttaattattagataaaggctcaaagacattctgttatactgcatgaagtatgttaagctaagcacagagaaaaaaaggcagcaagacatgttttataagattttagcattaaggaagtatatgatctgacttttcagaagaaaataaacaaatgcattatgtaaggtcagtcattatgacttatactaattcctagtgaaggcctaatgcacttgtaaaacaggattttctaggtgaattcatgatgaataccagatttactatgtatatgtggtgtgtctgaagttcttaacaaacatgggcaatattctggaaatgaaacaagttaaactgagcagcatttgggttgataccaagtgcataagattcaaactttgagtgacatttagtccatttatggttgatattaggtttaatagctagaattcaaattgattattgctagtggccaactaaacctgtacaaaatagctgacagttttataaataatttcaatataaaaattgttttaatggcatttgttgaaagaaaaaagcatggctaaaatgtataaaatgccatatttttaaattttggactttaagcatcttaatgagggcatataacaaattaattttagtacaaatcttaaatatttttaataaatcctttcattttaaaaagagaattgccaatacagaaaaggagtatccaaacaatgtctcaacctgataatttccttagcagaattacctattgcaacttctgttcagaaatacacagcttgtttttttgcccaaggatgagtctacattttaagaactgcaatggtataaaggaacttaaggattctgagaatcatagtaataacatacattggaatagtactttataatttacaatccccatttacatcatttcaccttaatgttgatgacaatgttttgaaacaaatactatttttcctactttgcttttgagaaaattgacactcagacttgccctaatcatgcactttacttaaggaaagatcgagaaatcaaatgaagttctcctgactctctggtttagtgctcttttgttattatcctttaaatcaaactgggctataatagcaataaaagttagacgaagtgtagaaaataaaataaatttcataatgttagtcttattgttatttggttattgtttacaagaaatgaaaattaagtacaaagtgcaaagatcattgttctgcggcttaaaatgaaatgagaaagttagtaaatcattcagcaactatgcagtcttactcaatattaatgtacctctaaggcattagcaatgagaagggcaaataattatggttttggtaaagttaatatttattgaacataatgagaaataatctatatggactagtcatatgaaatagattttattctatttgtgtgcactggagctggaaagccaagactgaaactttatctcttgctgcctgtgataccacattgacataccagaagaatattggaatgatcagttgttagtggcctaggattttatttgcctgttgagacacagccataatagatgttaagtctgtgattcttagacttttcaggtgatagagtacctggaagtcattcataatgatcgttatagaacatcataacatttctacattttcaattctgccatgatagctagtgtatttttaattttcaataaatgtaaccaacttacatgaaggaatgcaatataaaattataatcagtacatttgtccaacgttttcattagtattatcacctacttattcatcagttactaatatttcctgttagaaaagtgaggcaggaattaaagatttttttttaagaagcatggaaccaaaacttaaacttgctaaaaattattcattaatcttttctacataagtgattatccagtttatactgctacaagggcaaaagtctgaggcaagtgttttaagttaacttttaaaggtacaagaagaaaatgaaaaatcctcatgtgaaagatgtgtataattttcatgccttaattttcataatataaaaataaaacataattttaaaacaacctgataattttgttttgaaacattgaaaagaatgccaaaacaaatattagatttgtaattagtcagtatttaatatattttacccatgagctaaagcaaaaaagactcattatttatgatgcacaggattcaaagatgcctaaaattctgtattaaaaactatgtacactgtaatttaaatgttaaagttctaatatgcacatgttttccatgagctttttgtgcctatttgttttctgaatttatttttcaggaccaacatccttaacttggaagggaaaacatctctgatttgaacttgtatttatgtaccattcaattgtttccaaatggtccaatgggtataccatattttactactcttatattttacggaaaacatgaaaaagactgagaaactagccatttttgaatacagcaagggatagatgaggaaaggaaaaaagaaagaatatttcaagtttcaaactacttttaccatgttatatctatttgcccaaacgtttgacatatttttggtcaaacaaaaagctataagtttatggagcttgagtttaaaatgtgcattctttaggttaactcttaaacttgaaaaataagttgg

SEQ ID NO: 1000 - protein, 740 aa, Homo Sapiens
MTHMLNAAADRVKWTRSSAAKRAACLVAAAYALKTLYPIIGKRLKQSGHGKKKAAAYPAAENTEILHCTETICEKPSPGVNADFFKQLLELRKILFPKLVTTETGWLCLHSVALISRTFLSIYVAGLDGKIVKSIVEKKPRTFIIKLIKWLMIAIPATFVNSAIRYLECKLALAFRTRLVDHAYETYFTNQTYYKVINMDGRLANPDQSLTEDIMMFSQSVAHLYSNLTKPILDVMLTSYTLIQTATSRGASPIGPTLLAGLVVYATAKVLKACSPKFGKLVAEEAHRKGYLRYVHSRIIANVEEIAFYRGHKVEMKQLQKSYKALADQMNLILSKRLWYIMIEQFLMKYVWSSSGLIMVAIPIITATGFADGEDGQKQVMVSERTEAFTTARNLLASGADAIERIMSSYKEVTELAGYTARVYNMFWVFDEVKRGIYKRTAVIQESESHSKNGAKVELPLSDTLAIKGKVIDVDHGIICENVPIITPAGEVVASRLNFKVEEGMHLLITGPNGCGKSSLFRILSGLWPVYEGVLYKPPPQHMFYIPQRPYMSLGSLRDQVIYPDSVDDMHDKGYTDQDLERILHNVHLYHIVQREGGWDAVMDWKDVLSGGEKQRMGMARMFYHKPKYALLDECTSAVSIDVEGKIFQAAKGAGISLLSITHRPSLWKYHTHLLQFDGEGGWRFEQLDTAIRLTLSEEKQKLESQLAGIPKMQQRLNELCKILGEDSVLKTIKNEDETS

SEQ ID NO: 1001 - DNA, 6246 bp, Homo Sapiens
gacttaaactctggggcccgggaggccgccggttttctccccgcttgccggggtggtcctcttccctttgtcggaccaaagaagtaaacactgtgtggagagggactgacgtgtttggagggaaatgggaatgtacacgataattaaagagtaaagttgtgctcaacgctgtttacttctaattatttcctgattcacaaattaatttttgcaattcacaacttcaagaatacttggactattggattcaatccatagtaatctgcaaaagaagagaagcagaattatacctagaagtctactaatggacagttagtcacccacctacatgttgagattcctgacattcagacaactgacttgtaactgacttataactgacttgtaatacactgctactatatcaaaccgacaatgaattggaatgaaaaaccaaagagtgctacattaccaccactgtatcctaaaagccagccaccttttttgcaccagtctttaataaaccaaattaccacaacatctcagagttctttcagctatcctggaagtaaccaagaagcatgcatgtatcccggtaattcaaatccaatttcacagccactgctgaatatccaaaattatcctcaacaaatttctgtttctgatatgcataatgggacagttgtggcctcacacacttcagtagaaagaataacatatgcaaatgttaatggacccaaacaactaactcacaatttgcagatgtcttcaggagttacccaaaacgtatggttgaactcaccaatgaggaatcctgtgcattctcatataggggcaactgtatctcatcaaactgattttggagctaacgtacccaatatgccggcactacagagtcaactgataacatcagatacctattctatgcaaatgcagatgatcccttctaattctacacgacttcctgtagcttaccaaggaaatcagggacttaaccagtctttttcagagcaacaggttgattggacacaacagtgtatatctaagggactgacttacccagattacagaccacctccaaagctataccgttactcaccacaaagctttttaccagattctaccattcaaaaacaaaactttataccacatacatcattgcaagttaaaaatagtcagcttctaaattctgtattaactttaccatcaaggcagacctcagctgtaccatcacagcagtatgccacgcaaactgacaaaagacctcctcctcctccttacaactgtagatatggaagccagcctttgcaaagtactcagcatattactaaacacttgtctatggaagttcctcagagtcgagaaatgctgtcatctgaaataaggaccagctttcaacagcagtggcaaaaccctaatgaaaatgtcagcacaattggaaatttcactaacttgaaagtaaataccaacagcaaacagccttttaacagtcccattagatcttctgtggatggtgttcagactcttgctcaaactaatgaagagaaaataatggattcttgcaatccaacttcaaatcaagtactggacacaagtgttgcaaaagaaaagctagtaagggatattaaaacattagtagagataaaacagaagttttcagaacttgcaaggaaaattaaaatcaataaagatcttttgatggcagcaggttgtattaaaatgactaatacttcttatagtgaaccagctcagaattctaaattgtctctaaaacaaactgccaaaatccagtctggaccccagataactccagtaatgccagagaatgcagagagacaaacaccaacagtagtggaatctgcagaaacaaataagactcaatgtatgttgaattctgacattcaggaagtcaattgcagaaggtttaaccaagttgattctgttttaccaaatcctgtctattctgaaaagcggccaatgccagacccatctcatgatgtgaaagttctcacttcaaagacatcagctgttgagatgacccaggcagtattgaatactcagctttcatcagaaaatgttaccaaagttgagcaaaattcaccagcagtttgtgaaacaatttctgttcccaagtccatgtccactgaggaatataaatcaaaaattcaaaatgaaaatatgctacttctcgctttgctttcacaggcacgtaagactcagaagacagtattaaaagatgctaatcaaactattcaggattctaaaccagacagttgtgaaatgaatccaaatacccaaatgactggtaaccaactgaatttgaagaacatggaaactccaagtacttctaatgtaagtggcagggttttggacaactccttttgcagtggacaagaatcctcaacaaaaggaatgcctgctaaaagtgacagtagctgttccatggaagtgctagcaacctgtctttccctgtggaaaaagcaaccttcagatactgcaaaagaaaaggagtgtgataaactcagaacaaacacaacagcagttggaatttcaaagcctgctaacatccacgttaagagtccttgttcagttgtgggaaattcaaattctcagaataaaataagtaatccctcacagcagacagctttgtcgatggtaatgcacaattatgagtcttcaggtataaatataacaaagggaacagaacttcagatagctgtagtgtcaccgttagttctgtcagaggtcaaaacattgtctgtcaaaggaataacacctgcagtgttacctgaaacagtgtatcccgttattaaagaaggcagtgtttgtagtttacaaaatcaattggcagaaaatgcaaaggcaactgctgctttgaaagttgatgttagtggaccagtagcaagtacagcaacatcaaccaagatttttccactaactcagaaggaaaagcagaatgagtcaactaatggtaattcagaagtcacacctaatgtcaatcaaggaaagcataacaaattagagtcagctatccattctcctatgaacgatcagcaaatctcacaggagtcaaggaatagtactgttgtgagtagtgatacattacagattgacaatatttgttctctggttgaaggtgatacctcttacaattcccaaatagcaaagatattcagctctcttcccttgaaaatggttgagccacagaaaccttctctacccaatcagcaagggattggcagcagagaaccagaaaaacaattagataataccactgaaaataaagactttggttttcaaaaagataaacctgtacagtgcacagatgtttcacataaaatatgtgatcagtcaaagtcagagccacccttagagtcatcttttaacaatcttgaaacaaacagagttattctagagaaaagtagtttggagcatgccactgaaaaaagcacagctaacgatacgtgctcgtcagctgctattcaggaggatatttaccctcaggaaatagatgcatccagcaactatactccccaagatcctgcaagaaatgaaatccacagtgataaggcacctgtcttatacctacatgaccagctgtcagaacttctaaaagagtttccttatggcattgaggctgtgaatacacgtgaaggttctgtgggccagcaaactacataccagacctcagaagatcaaactgctgataaaaccagttctgactccaaagacccagcagatcaaatacaaattacaatattaagctcagagcaaatgaaagaaatatttcctgaacaggatgatcaaccctatgtagtagacaagttggcagaacctcagaaagaagagcccatcacagaagtagttagccagtgtgacctgcaggcacctgcagctggacaaagtcgtgattctgtgatactggactctgagaaagatgatatccactgctgtgcattgggctggctctccatggtttacgaaggagtaccccagtgtcagtgtaattccatcaagaactcatcttcagaggaagagaaacaaaaagagcagtgttctcctttggataccaacagttgtaaacaaggagagagaacttctgatagagatgtcactgttgttcaatttaagagccttgtaaataatccaaagactcctccagatgggaaaagtcattttcctgaactacaagacgacagtagaaaagatacacccaaaacaaaacataaaagcttaccaaggacagaacaagaattagttgctggtcagttttcatctaaatgtgataaactaaatcccttgcaaaatcacaaaagaaaaaaattgaggtttcacgaggtaacctttcactccagtaataaaatgacagcatcttatgaacaagcttctcaggaaacccgacagaagaaacatgtaacacagaactcacgtccactaaaaacaaaaacagcttttttgccaaataaagatgtgtataagaagcatagttctttgggacagtcattatcaccagaaaagataaaattgaaactcaaatcagttagcttcaaacaaaaacgaaagttagaccaagggaacgtattagatatggaagtaaagaaaaagaaacatgataaacaagaacagaaaggaagtgtgggagctacattcaaattaggtgactctttgtcaaacccaaacgaaagagccattgttaaagaaaagatggtatcaaatactaagtctgtagacacgaaagcgagttcatctaaatttagtagaattctaactcctaaggagtatttacaaaggcagaagcataaagaagctctgagtaataaagcatcgaagaaaatctgtgtgaaaaacgtgccatgtgattctgaacatatgagaccaagtaaacttgccgtgcaggttgaaagttgtgggaaatcaaatgagaaacacagcagcggcgtgcagacctctaaagaatcattaaatggcttgacaagccatggtaaaaacctcaaaatccaccattctcaggagtctaaaacatacaacattctaaggaatgttaaagaaaaagttggtgggaagcagcctgataaaatatggattgataagactaaattagacaaattaaccaatataagcaacgaagctcaattcagccaaatgcctccccaagtaaaggatcaaaagaaattatatctgaatagagttgggtttaaatgcactgaacgtgaaagcatttctctcaccaaattagaaagttcacccaggaagcttcataaagataagagacaggaaaataaacataagacctttttaccggtgaaaggtaacacagaaaaatcaaacatgctggagtttaaattatgtccagatatcttactaaagaatacaaactctgtggaagaacggaaggatgtaaagcctcatcctaggaaggagcaagcccctctgcaagtttcaggaataaaaagtacaaaagaagactggttaaaatttgttgctacaaagaaaaggacacagaaagacagccaagagagagataatgttaattcaagactctcgaagagaagcttcagtgcagatggatttgagatgctacaaaacccagtaaaagattcaaaagaaatgtttcaaacctacaaacagatgtacctggagaagagaagcagaagccttggtagcagtcctgtaaaataattacaagatgtggttttgtaattgccactgggaaatttctttccttttctgttcaaaatatttcgctgaaactaatgagaaatgccatgataaagatttctcagagtttggttcccactttcattgtatttcattgaaagtgcttaattaaaatggcttgagaactttgggtagccatgtgtaagaaatggatggtattcaccggggaaacaaggtatttgaatttctactttattgaaccagatttaccattattttaaaaggaatgcttatacaaatcaatttgaaattctacccatcttgagggaggaccgttcctcagttaaggacttgtttatttaaatgggactgtaaatatgttttggtttctaagctatattagcaaaatttatttttcaaaaatgcccactgtgatgtgaatgtcaaaatatattcttaagtgttttataactaattgtaaactttttttcagaagtcttattttatacttgtgaaactgaacacaattttgggacaacgtttaaacattacttttcatacttgaaataaacatttattttttaaaaaactaaaaaaaaaaaaaaaaaa

SEQ ID NO: 1002 - protein, 1747 aa, Homo Sapiens
MNWNEKPKSATLPPLYPKSQPPFLHQSLINQITTTSQSSFSYPGSNQEACMYPGNSNPISQPLLNIQNYPQQISVSDMHNGTVVASHTSVERITYANVNGPKQLTHNLQMSSGVTQNVWLNSPMRNPVHSHIGATVSHQTDFGANVPNMPALQSQLITSDTYSMQMQMIPSNSTRLPVAYQGNQGLNQSFSEQQVDWTQQCISKGLTYPDYRPPPKLYRYSPQSFLPDSTIQKQNFIPHTSLQVKNSQLLNSVLTLPSRQTSAVPSQQYATQTDKRPPPPPYNCRYGSQPLQSTQHITKHLSMEVPQSREMLSSEIRTSFQQQWQNPNENVSTIGNFTNLKVNTNSKQPFNSPIRSSVDGVQTLAQTNEEKIMDSCNPTSNQVLDTSVAKEKLVRDIKTLVEIKQKFSELARKIKINKDLLMAAGCIKMTNTSYSEPAQNSKLSLKQTAKIQSGPQITPVMPENAERQTPTVVESAETNKTQCMLNSDIQEVNCRRFNQVDSVLPNPVYSEKRPMPDPSHDVKVLTSKTSAVEMTQAVLNTQLSSENVTKVEQNSPAVCETISVPKSMSTEEYKSKIQNENMLLLALLSQARKTQKTVLKDANQTIQDSKPDSCEMNPNTQMTGNQLNLKNMETPSTSNVSGRVLDNSFCSGQESSTKGMPAKSDSSCSMEVLATCLSLWKKQPSDTAKEKECDKLRTNTTAVGISKPANIHVKSPCSVVGNSNSQNKISNPSQQTALSMVMHNYESSGINITKGTELQIAVVSPLVLSEVKTLSVKGITPAVLPETVYPVIKEGSVCSLQNQLAENAKATAALKVDVSGPVASTATSTKIFPLTQKEKQNESTNGNSEVTPNVNQGKHNKLESAIHSPMNDQQISQESRNSTVVSSDTLQIDNICSLVEGDTSYNSQIAKIFSSLPLKMVEPQKPSLPNQQGIGSREPEKQLDNTTENKDFGFQKDKPVQCTDVSHKICDQSKSEPPLESSFNNLETNRVILEKSSLEHATEKSTANDTCSSAAIQEDIYPQEIDASSNYTPQDPARNEIHSDKAPVLYLHDQLSELLKEFPYGIEAVNTREGSVGQQTTYQTSEDQTADKTSSDSKDPADQIQITILSSEQMKEIFPEQDDQPYVVDKLAEPQKEEPITEVVSQCDLQAPAAGQSRDSVILDSEKDDIHCCALGWLSMVYEGVPQCQCNSIKNSSSEEEKQKEQCSPLDTNSCKQGERTSDRDVTVVQFKSLVNNPKTPPDGKSHFPELQDDSRKDTPKTKHKSLPRTEQELVAGQFSSKCDKLNPLQNHKRKKLRFHEVTFHSSNKMTASYEQASQETRQKKHVTQNSRPLKTKTAFLPNKDVYKKHSSLGQSLSPEKIKLKLKSVSFKQKRKLDQGNVLDMEVKKKKHDKQEQKGSVGATFKLGDSLSNPNERAIVKEKMVSNTKSVDTKASSSKFSRILTPKEYLQRQKHKEALSNKASKKICVKNVPCDSEHMRPSKLAVQVESCGKSNEKHSSGVQTSKESLNGLTSHGKNLKIHHSQESKTYNILRNVKEKVGGKQPDKIWIDKTKLDKLTNISNEAQFSQMPPQVKDQKKLYLNRVGFKCTERESISLTKLESSPRKLHKDKRQENKHKTFLPVKGNTEKSNMLEFKLCPDILLKNTNSVEERKDVKPHPRKEQAPLQVSGIKSTKEDWLKFVATKKRTQKDSQERDNVNSRLSKRSFSADGFEMLQNPVKDSKEMFQTYKQMYLEKRSRSLGSSPVK

SEQ ID NO: 1003 - DNA, 1872 bp, Homo Sapiens
ggcagccagaagcacctgtgctcccaggataagggtgagcactcaggatgactgtggagaaggaggcccctgatgcgcacttcactgtggacaaacagaacatctccctctggccccgagagcctcctcccaagtccggtccatctctggtcccggggaaaacacccacagtccgtgctgcattaatctgcctgacgctggtcctggtcgcctccgtcctgctgcaggccgtcctttatccccggtttatgggcaccatatcagatgtaaagaccaatgtccagttgctgaaaggtcgtgtggacaacatcagcaccctggattctgaaattaaaaagaatagtgacggcatggaggcagctggcgttcagatccagatggtgaatgagagcctgggttatgtgcgttctcagttcctgaagttaaaaaccagtgtggagaaggccaacgcacagatccagatcttaacaagaagttgggaagaagtcagtaccttaaatgcccaaatcccagagttaaaaagtgatttggagaaagccagtgctttaaatacaaagatccgggcactccagggcagcttggagaatatgagcaagttgctcaaacgacaaaatgatattctacaggtggtttctcaaggctggaagtacttcaaggggaacttctattacttttctctcattccaaagacctggtatagtgccgagcagttctgtgtgtccaggaattcacacctgacctcggtgacctcagagagtgagcaggagtttctgtataaaacagcggggggactcatctactggattggcctgactaaagcagggatggaaggggactggtcctgggtggatgacacgccattcaacaaggtccaaagtgcgaggttctggattccaggtgagcccaacaatgctgggaacaatgaacactgtggcaatataaaggctccctcacttcaggcctggaatgatgccccatgtgacaaaacgtttcttttcatttgtaagcgaccctatgtcccatcagaaccgtgacaggacaggctcccaagctcactctttgagctccaacgcttgttaaacatgaggaaatgcctctttcttccccagactccaggatgactttgcacgttaatttttcttgcttcaaaattgtcccacagtggcattctggagtccgtctgtcttggctggaaattctctgacgtcttggaggcagctggaatggaaaggagaattcaggttaaagtgggaggggtgggtagagaggatttagaagttccaattgccctgctaaggaggatcaagacccgtaatccggcataacaccctggggttttccactctttcagagaaacctcagcttcatcacatcaaagttactccagagcaaccaagcaattctcctgatattgtcatccagggcttttcttggccaaaccccctagaatttccatgtctctgcttagctgtgctggcagctagcagctggctgtgtttgcagtgcaaatagctctgttcttggaaatcctgctcatggtatgtccccagtggtttcttcatccacatcatctaaagcctgaacccgttcttctctggttcaagtcagtggctgacacggacttgtatctccttcagagctcggctggcacccagcctcccttctccttccactcccttagtacactggagtgccgagccctgccttccacccagcgtccatccagcccctgtcctcacctctccggcacctcctcctccttctgcatttcctatcttcctgtgtcttgtgcatgggaagcagccttcagtgccttcatgaattcaccttccagcttcctcagaataaaatgctgcctgggtcaaggactca

SEQ ID NO: 1004 - protein, 328 aa, Homo Sapiens
MTVEKEAPDAHFTVDKQNISLWPREPPPKSGPSLVPGKTPTVRAALICLTLVLVASVLLQAVLYPRFMGTISDVKTNVQLLKGRVDNISTLDSEIKKNSDGMEAAGVQIQMVNESLGYVRSQFLKLKTSVEKANAQIQILTRSWEEVSTLNAQIPELKSDLEKASALNTKIRALQGSLENMSKLLKRQNDILQVVSQGWKYFKGNFYYFSLIPKTWYSAEQFCVSRNSHLTSVTSESEQEFLYKTAGGLIYWIGLTKAGMEGDWSWVDDTPFNKVQSARFWIPGEPNNAGNNEHCGNIKAPSLQAWNDAPCDKTFLFICKRPYVPSEP

SEQ ID NO: 1005 - DNA, 1690 bp, Homo Sapiens
tgctttctcaaaggccccacagtcctccacttcctggggaggtagctgcagaataaaaccagcagagactccttttctcctaaccgtcccggccaccgctgcctcagcctctgcctcccagcctctttctgagggaaaggacaagatgaagtggaaggcgcttttcaccgcggccatcctgcaggcacagttgccgattacagaggcacagagctttggcctgctggatcccaaactctgctacctgctggatggaatcctcttcatctatggtgtcattctcactgccttgttcctgagagtgaagttcagcaggagcgcagacgcccccgcgtaccagcagggccagaaccagctctataacgagctcaatctaggacgaagagaggagtacgatgttttggacaagagacgtggccgggaccctgagatggggggaaagccgcagagaaggaagaaccctcaggaaggcctgtacaatgaactgcagaaagataagatggcggaggcctacagtgagattgggatgaaaggcgagcgccggaggggcaaggggcacgatggcctttaccagggtctcagtacagccaccaaggacacctacgacgcccttcacatgcaggccctgccccctcgctaacagccaggggatttcaccactcaaaggccagacctgcagacgcccagattatgagacacaggatgaagcatttacaacccggttcactcttctcagccactgaagtattcccctttatgtacaggatgctttggttatatttagctccaaaccttcacacacagactgttgtccctgcactctttaagggagtgtactcccagggcttacggccctggccttgggccctctggtttgccggtggtgcaggtagacctgtctcctggcggttcctcgttctccctgggaggcgggcgcactgcctctcacagctgagttgttgagtctgttttgtaaagtccccagagaaagcgcagatgctagcacatgccctaatgtctgtatcactctgtgtctgagtggcttcactcctgctgtaaatttggcttctgttgtcaccttcacctcctttcaaggtaactgtactgggccatgttgtgcctccctggtgagagggccgggcagaggggcagatggaaaggagcctaggccaggtgcaaccagggagctgcaggggcatgggaaggtgggcgggcaggggagggtcagccagggcctgcgagggcagcgggagcctccctgcctcaggcctctgtgccgcaccattgaactgtaccatgtgctacaggggccagaagatgaacagactgaccttgatgagctgtgcacaaagtggcataaaaaacatgtggttacacagtgtgaataaagtgctgcggagcaagaggaggccgttgattcacttcacgctttcagcgaatgacaaaatcatctttgtgaaggcctcgcaggaagacccaacacatgggacctataactgcccagcggacagtggcaggacaggaaaaacccgtcaatgtactaggatactgctgcgtcattacagggcacaggccatggatggaaaacgctctctgctctgctttttttctactgttttaatttatactggcatgctaaagccttcctattttgcataataaatgcttcagtgaaaatgcaaaaaaaaaa

SEQ ID NO: 1006 - protein, 164 aa, Homo Sapiens
MKWKALFTAAILQAQLPITEAQSFGLLDPKLCYLLDGILFIYGVILTALFLRVKFSRSADAPAYQQGQNQLYNELNLGRREEYDVLDKRRGRDPEMGGKPQRRKNPQEGLYNELQKDKMAEAYSEIGMKGERRRGKGHDGLYQGLSTATKDTYDALHMQALPPR

SEQ ID NO: 1007 - DNA, 1320 bp, Homo Sapiens
cggaaggggaagggggtggaggttgctgctatgagagagaaaaaaaaaacagccacaatagagattctgccttcaaaggttggcttgccacctgaagcagccactgcccagggggtgcaaagaagagacagcagcgcccagcttggaggtgctaactccagaggccagcatcagcaactgggcacagaaaggagccgcctgggcagggaccatggcacggccacatccctggtggctgtgcgttctggggaccctggtggggctctcagctactccagcccccaagagctgcccagagaggcactactgggctcagggaaagctgtgctgccagatgtgtgagccaggaacattcctcgtgaaggactgtgaccagcatagaaaggctgctcagtgtgatccttgcataccgggggtctccttctctcctgaccaccacacccggccccactgtgagagctgtcggcactgtaactctggtcttctcgttcgcaactgcaccatcactgccaatgctgagtgtgcctgtcgcaatggctggcagtgcagggacaaggagtgcaccgagtgtgatcctcttccaaacccttcgctgaccgctcggtcgtctcaggccctgagcccacaccctcagcccacccacttaccttatgtcagtgagatgctggaggccaggacagctgggcacatgcagactctggctgacttcaggcagctgcctgcccggactctctctacccactggccaccccaaagatccctgtgcagctccgattttattcgcatccttgtgatcttctctggaatgttccttgttttcaccctggccggggccctgttcctccatcaacgaaggaaatatagatcaaacaaaggagaaagtcctgtggagcctgcagagccttgtcgttacagctgccccagggaggaggagggcagcaccatccccatccaggaggattaccgaaaaccggagcctgcctgctccccctgagccagcacctgcgggagctgcactacagccctggcctccacccccaccccgccgaccatccaagggagagtgagacctggcagccacaactgcagtcccatcctcttgtcagggccctttcctgtgtacacgtgacagagtgccttttcgagactggcagggacgaggacaaatatggatgaggtggagagtgggaagcaggagcccagccagctgcgcctgcgctgcaggagggcgggggctctggttgtaaaacacacttcctgctgcgaaagacccacatgctacaagacgggcaaaataaagtgacagatgaccaccctgca

SEQ ID NO: 1008 - protein, 260 aa, Homo Sapiens
MARPHPWWLCVLGTLVGLSATPAPKSCPERHYWAQGKLCCQMCEPGTFLVKDCDQHRKAAQCDPCIPGVSFSPDHHTRPHCESCRHCNSGLLVRNCTITANAECACRNGWQCRDKECTECDPLPNPSLTARSSQALSPHPQPTHLPYVSEMLEARTAGHMQTLADFRQLPARTLSTHWPPQRSLCSSDFIRILVIFSGMFLVFTLAGALFLHQRRKYRSNKGESPVEPAEPCRYSCPREEEGSTIPIQEDYRKPEPACSP

SEQ ID NO: 1009 - DNA, 2248 bp, Homo Sapiens
gatcatctgataatgctttgcctgcactcaggacctgtctttgtccctcctcttaacatacttgcagctaaaactaaatattgctgcttggggacctccttctagccttaaatttcagctcatcaccttcacctgccttggtcatggctctgctattctccttgatccttgccatttgcaccagacctggattcctagcgtctccatctggagtgcggctggtggggggcctccaccgctgtgaagggcgggtggaggtggaacagaaaggccagtggggcaccgtgtgtgatgacggctgggacattaaggacgtggctgtgttgtgccgggagctgggctgtggagctgccagcggaacccctagtggtattttgtatgagccaccagcagaaaaagagcaaaaggtcctcatccaatcagtcagttgcacaggaacagaagatacattggctcagtgtgagcaagaagaagtttatgattgttcacatgatgaagatgctggggcatcgtgtgagaacccagagagctctttctccccagtcccagagggtgtcaggctggctgacggccctgggcattgcaagggacgcgtggaagtgaagcaccagaaccagtggtataccgtgtgccagacaggctggagcctccgggccgcaaaggtggtgtgccggcagctgggatgtgggagggctgtactgactcaaaaacgctgcaacaagcatgcctatggccgaaaacccatctggctgagccagatgtcatgctcaggacgagaagcaacccttcaggattgcccttctgggccttgggggaagaacacctgcaaccatgatgaagacacgtgggtcgaatgtgaagatccctttgacttgagactagtaggaggagacaacctctgctctgggcgactggaggtgctgcacaagggcgtatggggctctgtctgtgatgacaactggggagaaaaggaggaccaggtggtatgcaagcaactgggctgtgggaagtccctctctccctccttcagagaccggaaatgctatggccctggggttggccgcatctggctggataatgttcgttgctcaggggaggagcagtccctggagcagtgccagcacagattttgggggtttcacgactgcacccaccaggaagatgtggctgtcatctgctcaggatagtatcctggtgttgcttgacctggcccccctggccccgcctgccctctgcttgttctcctgagccctgattatcctcatactcattctggggctcaggcttgagccactactccctcatcccctcaggagtctgaacactgggcttatgccttactctcagggacaagcagcccccattgctgcctgtagatgtgagctgttgagttccctcttgctggggaagatgagcttccatgtatcctgtgctcaaccctgaccctttgacactggttctggcctttcctgccttttctcaagctgcctggaatcctcaaacctgtcactttggtcagatgtgcagaccattactaaggtctatgtctgcaaacattactaatctaggtcctattactaatctatgtctgcaaacattaaaggaatgaaacaatgaaaggaacatttgaaagaaaatgtgggtagacaatttcttgcaacttgggggaaagtttagaattcttttgattggactactttttttttttttcctcaagcttcaggtgaccacaatagcaacacctccctattctgttatttcttagtgtaggtagacaattctttcaggagcagagcagcgtcctataatcctagaccttttcatgacgtgtaaaaaatgatgtttcatcctctgattgccccaataaaaatctttgttgtccatccctatacaacctgccaacatggttgacatttaatgagaggaatgtcaaaaatacattttactttattcaaagaaaaatatattggttactgggaaaaggtcaagaaagaggcagaaagagatcagggagggctaaagttgtgtcttatgccaagcgaaagtgaaaaatatcattttcactttatcaactgagactttggggcctgtaagcttgaggcaagacagaaataagagaatcaagacttgattgtaaaaattgacaactttagattctgaggctaggctgagtacttattatacggctacatttacacatttacacttatctaataaatcagatttcacagtctcaaaaaaaaaaaaa

SEQ ID NO: 1010 - protein, 347 aa, Homo Sapiens
MALLFSLILAICTRPGFLASPSGVRLVGGLHRCEGRVEVEQKGQWGTVCDDGWDIKDVAVLCRELGCGAASGTPSGILYEPPAEKEQKVLIQSVSCTGTEDTLAQCEQEEVYDCSHDEDAGASCENPESSFSPVPEGVRLADGPGHCKGRVEVKHQNQWYTVCQTGWSLRAAKVVCRQLGCGRAVLTQKRCNKHAYGRKPIWLSQMSCSGREATLQDCPSGPWGKNTCNHDEDTWVECEDPFDLRLVGGDNLCSGRLEVLHKGVWGSVCDDNWGEKEDQVVCKQLGCGKSLSPSFRDRKCYGPGVGRIWLDNVRCSGEEQSLEQCQHRFWGFHDCTHQEDVAVICSG

SEQ ID NO: 1011 - DNA, 2325 bp, Homo Sapiens
actcctggctggggtgggacagggtggccagataaaagcagagcaggacctggaaagctggtttgtatgggctgcagcctgccgctgagctgcatcatggtgcggtctgtggcctgggcaggtttcatggtcctgctgatgatcccatggggctctgctgcaaaactggtctgctacttcaccaactgggcccagtacagacagggggaggctcgcttcctgcccaaggacttggaccccagcctttgcacccacctcatctacgccttcgctggcatgaccaaccaccagctgagcaccactgagtggaatgacgagactctctaccaggagttcaatggcctgaagaagatgaatcccaagctgaagaccctgttagccatcggaggctggaatttcggcactcagaagttcacagatatggtagccacggccaacaaccgtcagacctttgtcaactcggccatcaggtttctgcgcaaatacagctttgacggccttgaccttgactgggagtacccaggaagccaggggagccctgccgtagacaaggagcgcttcacaaccctggtacaggacttggccaatgccttccagcaggaagcccagacctcagggaaggaacgccttcttctgagtgcagcggttccagctgggcagacctatgtggatgctggatacgaggtggacaaaatcgcccagaacctggattttgtcaaccttatggcctacgacttccatggctcttgggagaaggtcacgggacataacagccccctctacaagaggcaagaagagagtggtgcagcagccagcctcaacgtggatgctgctgtgcaacagtggctgcagaaggggacccctgccagcaagctgatccttggcatgcctacctacggacgctccttcacactggcctcctcatcagacaccagagtgggggccccagccacagggtctggcactccaggccccttcaccaaggaaggagggatgctggcctactatgaagtctgctcctggaagggggccaccaaacagagaatccaggatcagaaggtgccctacatcttccgggacaaccagtgggtgggctttgatgatgtggagagcttcaaaaccaaggtcagctatctgaagcagaagggactgggcggggccatggtctgggcactggacttagatgactttgccggcttctcctgcaaccagggccgataccccctcatccagacgctacggcaggaactgagtcttccatacttgccttcaggcaccccagagcttgaagttccaaaaccaggtcagccctctgaacctgagcatggccccagccctggacaagacacgttctgccagggcaaagctgatgggctctatcccaatcctcgggaacggtccagcttctacagctgtgcagcggggcggctgttccagcaaagctgcccgacaggcctggtgttcagcaactcctgcaaatgctgcacctggaattgagtcgctaaagcccctccagtcccagctttgaggctgggcccaggatcactctacagcctgcctcctgggttttccctgggggccgcaatctggctcctgcaggcctttctgtggtcttcctttatccaggctttctgctctcagccttgccttccttttttctgggtctcctgggctgcccctttcacttgcaaaataaatctttggtttgtgcccctcttcccaaagatgtggtgacttaagaggctctctaagcacactgttgactccaaaacatccgcaggtcagagccaggtgggaaggtggtccgtgcaggatgtgccaggccctgtggcaggtcttgccccatgagtccatatgccagtgggcagtttccagtacacaggtgatggcagccagagcgcggccccaagtgcaacacgttctttggttattggctcagaagcctggaaacaggagcttctgcggaccttcacgcacgtgttattcccaaaatgccactagatggcagcagagaagaacttttccctgatttaagcgctctgcgagcagccactcagcattacactaagaattcagacccctggtactcaggggtcttcgagataaatcctgtttgggccctttgcaggccctatctcacctactgcccccgttcaccagatgaagaaggaacaatgattattctcactttataggcatttaaactgaagactgattctaaccaattctgagtccagaaccaaggcctgaaatgggccagagagcatgcacacggtgtcctggttaaataaagtcatcccaacattcaaaaaaaaaaaaaaaaaa

SEQ ID NO: 1012 - protein, 466 aa, Homo Sapiens
MVRSVAWAGFMVLLMIPWGSAAKLVCYFTNWAQYRQGEARFLPKDLDPSLCTHLIYAFAGMTNHQLSTTEWNDETLYQEFNGLKKMNPKLKTLLAIGGWNFGTQKFTDMVATANNRQTFVNSAIRFLRKYSFDGLDLDWEYPGSQGSPAVDKERFTTLVQDLANAFQQEAQTSGKERLLLSAAVPAGQTYVDAGYEVDKIAQNLDFVNLMAYDFHGSWEKVTGHNSPLYKRQEESGAAASLNVDAAVQQWLQKGTPASKLILGMPTYGRSFTLASSSDTRVGAPATGSGTPGPFTKEGGMLAYYEVCSWKGATKQRIQDQKVPYIFRDNQWVGFDDVESFKTKVSYLKQKGLGGAMVWALDLDDFAGFSCNQGRYPLIQTLRQELSLPYLPSGTPELEVPKPGQPSEPEHGPSPGQDTFCQGKADGLYPNPRERSSFYSCAAGRLFQQSCPTGLVFSNSCKCCTWN

SEQ ID NO: 1013 - DNA, 5361 bp, Homo Sapiens
actcatagaaactggaggcaaaatgcatgacagtaacaatgtggagaaagacattacaccatctgaattgcctgcaaacccaggttgtctgcattcaaaagagcattctattaaagctaccttaatttggcgcttatttttcttaatcatgtttctgacaatcatagtgtgtggaatggttgctgctttaagcgcaataagagctaactgccatcaagagccatcagtatgtcttcaagctgcatgcccagaaagctggattggttttcaaagaaagtgtttctatttttctgatgacaccaagaactggacatcaagtcagaggttttgtgactcacaagatgctgatcttgctcaggttgaaagcttccaggaactgaatttcctgttgagatataaaggcccatctgatcactggattgggctgagcagagaacaaggccaaccatggaaatggataaatggtactgaatggacaagacagttagtcatgaaagaagatggtgccaacttgtatgttgcaaaggtttcacaagttcctcgaatgaatccaagacctgtcatggtttcctatcctgggagcaggagagtgtgcctatttgaatgacaaaggtgccagtagtgccaggcactacacagagaggaagtggatttgttccaaatcagatatacatgtctagatgttacagcaaagccccaactaatctttagaagcatattggaactgataactccattttaaaatgagcaaagaatttatttcttataccaacaggtatatgaaaatatgctcaatatcactaataactgggaaaatacaaatcaaaatcatagtaaaatattacctgttttcatggtgctaatattacctgttctcccactgctaatgacatacccgagactgagtaatttataaataaaagagatttaattgactcatagttccacatggctggggaggtcttgcaatcatgacagaaggcaaatgggaagcaaagtcatgtcttatgtggtggcaggcagggggacttgtgcacaggaactcctatttatacaaccatcagatatcttgagacaagaacagtatggggctccctggtgtgattccgtcctgcgcggctgttctctggagcagcattcatttatcttcgtctgccttgtctcctacctaagtgtgtgtcgccacccgatggaagattcgatggacatggacatgagccccctgaggccccagaactatcttttcagttgtgaactaaaggccgacaaagatgatcactttaaggtggataatgatgaaaatgagaccagttatctttaagaacggtcagctcaggggctggtgcaaaggatgaactgcacattgttgaagcagaggccatgaatgacgaaggcagtccaattaaagtaacactggcaactttgaaaatgtctgtacagccaacggtttctcttgggggctttgaaataacaccaccagtggacttaaggttgaagtgtggttcagggccagtgcatattagtggacagcacttagtagctgtgaaggaaggtgcagagtcagaagatgaagaagaggaggatgtgaaactcttaagtatatctggaaagcagtctgcccctggaggtgggcagaaaaaagtaaaacttgctgctgctgctgatgatgatgatgatgaagatgatgatgatgatgatgacgaggaagctgaagaaaaagcgccagtgaagaaatctatacgagatactccagccaaaaatgcacaaaagtcaaatcagaatggaaaagactcaaaaccatcatcaacaccaagatcaaaaggacaagaatccttcaaaaaacaggaaaaatctcctaaaacaccaaaaggatctagttctgtagaagacattaaagcaaaaatgcaagcaagtatagaaaaacgtggttctcttcccaaagtggaaaccaagttcatcaattatgtgaagaatttcttctggatgactgaccaagaggctattcaagatctctggcagtggaggaagtctctttaagaaaatagtttaaacaatttgttaaaaattttccatcttatttcatttctgtaacagttgatatctggctgtcctttttatagtgcagagtgagaactttccctaccatgtttgataaatgttgtccaggttctattgccaagaatgtgttgtccaaaatgcctgtttagtttttaaagatggaactccaccctttgcttggttttaagtatgtatgggatgctatgataggacatagtagtagcagtggtcagacatggaaatggtggggagacaaaagtatacacgtgaaataaaactcagtattttaataaagtaaaaaaaaaaaaaaaggtatggggaaaactgcccccataaagcaattgtctccacctggccctgccctttgcatgtggagattattacaattcaaggtgaaatttgggtggagacacaaccaaaccatatcagatggctatatcaaaaagacaagaaataacaagcattggtgagagtgtggagaagacggaacccttgtacacagttggtgggaacacagtttggtgcagccattatagaaaacgtcatggaggttcctaaagaaattaaaaagagaactaccatatgagccagcaatcccttttccagatatacacccaaaggaaatgaaatcaccacctcataaagatatctgctttcctgtttattataacacatctttattcataatagccaagatacggaactaactgaagtgaccattaacagatgaatggataaagaaattgtcatatatataaaacacacacattatatacatacatacatatatatatatatataaaaaatagaatattattcagccttgtaaaaagaaatcctgttatgttgggaacaagccccccaaaatctggccataaactcaccccaaaactggccataaacaaaatctctgcagcactgtgacatgttagtgatggccataacacccacgctggaaggttgtgggtttatgggaatgagggcaaggaacacctggcctgcccagggtggaaaaccacttaaaggcgttcttaagctacaaacaatagcatgagcgatctgtgccttaaggacatgttcctgctgcagttaactagcccaatctattcctttaattcggcccatcccttcatttcccataagggatacttttagttaatttaatatctatagaaacaatgctaatgactggcttgctgttaataaatacatgggtaaatctctgttctgggctctcagctctgaaggctgtgagacccctgatttcccacttcacacctctatatttctgtgtgtgtgtctttagttcctctggcgctgctgggttaggatctacccgactgagctggtctcagcactgttatttgaaacaatgtaaataaacctatagggtttattatatatactaagtgaaataagccagacacagaaaaaaaatgttgcatgatctcacttatagtgaaacttaaaaaaaaaacccaaatacatagaaatagagtagaatggtggttaccagagatgaggaaaatacagagacacaggtcaaaagatacagagttgcagttacaaagggtgagtatgtctagatatctaacatacagtatgaggactataatagtattgcactgtgtactgaaaacttgatgacagattttagatattcttaccacacagacaaaaagaaatgtaagtatgtgagatgaagcttatgttaattagattaagtgtatgtacataaaaacatcacattatacacatcaaatatatacaataaaaaagcacattgggagatacatgataaatttctatctgcagttgctatttgcatttttaaaggatatttttattttttaaatttttagctgacaactgtataattatggaatacaatgtgatgttctgatatatgtgtacactatggaatgattaaatcaaactaacatttcatcatctcacatacttatcattttctgtggtgagaacatttgaaatttattctcttgacaattttgaaagatccaatacactattattaactatagtcactatgctgtgcaatagatctcaaaagcttattcctcttaactgaaacctactaccctgtgacatgtggggaacatctctctattccccagccccagtccctaaatgttgaatacacaatggggaaaaaatagtcttcaatgaatggtggtgggaaaattgtatatccacatgcagaagaataaaattggacccttacctcctaccatatataaaaaccaactgaaaatcgattaaagacttaaactgtaaaactactaaaagaaaatatagggagaaagcttcacaacgttggtctgggcaataatttttggatttgacctcaaaagtagatgcaaccacagtgaaaataaacaaatgaaattgcataaaataaaaaatgtttctgcacagcaaaggaaataattaatggagtaaagagacaacttacagattgggagaatatatttccaaactattgttggggctcagaaacggataccctaacatatagtgatttgacaggtggaactaaagaagactcgaggtctctctgacctcctcctcaacctctgtttcttaatcctctgttttcccagagcacaggaggaagttctctgaagttcctttatctgctttaagttcagactcaccaaataagaaaacagttaattctggtgccttccatgggttttcattaactgaagtcatattgtaggaaaaagaatgaagtctcttaacccacctggatagatttttctcacaaaccattgtcttctctgcaagcccagtagactttgtcccaggccatttatgtgatcttcaccccattaagttctccccaaattatttactcttcccccaaaatcacccacacttccccatctccctctcccctaaggacaagggtatatcaccatctataccccattgcttggtggggtgatcactctgattctctgcatgcatttttatagatttgtttgccatttatcctattaatctgcattctgtcaattgtggcaagttatcagcatattttttaacttttaattattcttaatggaaagacacttctgtatacactggaaatctcaggaaatttcttttttccttaagcttaattgaaatgtttacttttcagtaaaatttcaagcttgagtaatgttcatgcctgcttttcattgaaatagaatgaaaaggttgcacaatattattttcatgaaattacttctagtataattctgaataaacactttgaaaggcagtgaactgtaaata

SEQ ID NO: 1014 - protein, 194 aa, Homo Sapiens
MHDSNNVEKDITPSELPANPGCLHSKEHSIKATLIWRLFFLIMFLTIIVCGMVAALSAIRANCHQEPSVCLQAACPESWIGFQRKCFYFSDDTKNWTSSQRFCDSQDADLAQVESFQELNFLLRYKGPSDHWIGLSREQGQPWKWINGTEWTRQLVMKEDGANLYVAKVSQVPRMNPRPVMVSYPGSRRVCLFE

SEQ ID NO: 1015 - DNA, 940 bp, Homo Sapiens
gctgtggccctggcacctgcccctgggctgggacagcccactgttccatgctgcccaagaaggctcagcacaggcacaaaccattgcccggcactggcccgtgctgcctgagaaggattggcacgggcacagaccactgcccccacctgccctgcgccatctacccaagaaggctcggcacgggcaccaaccactgcctccaactgccccatgctgcctgagaaggcactgcacggccacccccaactgccccgcactgtccctacccgggcagccatgcgagcggctggaactctgctggccttctgctgcctggtcttgagcaccactgggggcccttccccagatacttgttcccaggaccttaactcacgtgtgaagccaggatttcctaaaacaataaagaccaatgacccaggagtcctccaagcagccagatacagtgttgaaaagttcaacaactgcacgaacgacatgttcttgttcaaggagtcccgcatcacaagggccctagttcagatagtgaaaggcctgaaatatatgctggaggtggaaattggcagaactacctgcaagaaaaaccagcacctgcgtctggatgactgtgacttccaaaccaaccacaccttgaagcagactctgagctgctactctgaagtctgggtcgtgccctggctccagcacttcgaggtgcctgttctccgttgtcactgacccccgcctcttcagcaagaccacagccatgacaaacaccaggatgcatgctccttgtcccctcccacccgcctcatgacccagcctcacagaccctctcaggcctctgacgagtgagcgggtgaagtgccactgggtcaccgcagggcagctggaatggcagcatggtagcacctcctaacagattaaatagatcacatttgcttctaaaattaaaaaaaaaaaa

SEQ ID NO: 1016 - protein, 145 aa, Homo Sapiens
MRAAGTLLAFCCLVLSTTGGPSPDTCSQDLNSRVKPGFPKTIKTNDPGVLQAARYSVEKFNNCTNDMFLFKESRITRALVQIVKGLKYMLEVEIGRTTCKKNQHLRLDDCDFQTNHTLKQTLSCYSEVWVVPWLQHFEVPVLRCH

SEQ ID NO: 1017 - DNA, 6358 bp, Homo Sapiens
aatgattgaagatagtgggaaaagaggaaataccatggcagaaagaagacagctgtttgcagagatgagggctcaagatctggatcgcatccgactctccacctacagaacagcatgcaagcttaggtttgttcagaagaaatgcaatttgcacctggtggacatatggaatgtcatagaagcattgcgggaaaatgctctgaacaacctggacccaaacactgaactcaacgtgtcccgcttagaggctgtgctctccactattttttaccagctcaacaaacggatgccaaccactcaccaaatccatgtggagcagtccatcagcctcctccttaacttcctgcttgcagcgtttgatccggaaggccatggtaaaatttcagtatttgctgtcaaaatggctttagccacattgtgtggagggaagatcatggacaaattaagatatattttctcaatgatttctgactccagtggggtgatggtttatggacgatatgaccaattccttcgggaagttctcaaactacccacggcagtttttgaaggtccttcatttggttacacagaacagtcagccagatcctgtttctcccaacagaaaaaagtcacgttaaatggtttcttggacacgcttatgtcagatcctcccccgcagtgtctggtctggttgcctcttctgcatcgactagcaaatgtggaaaatgtcttccatccggttgagtgttcctactgccacagtgagagtatgatgggatttcgctaccgatgccaacagtgtcacaattaccagctctgtcaggactgcttctggaggggacatgccggtggttctcatagcaaccagcaccaaatgaaagagtacacgtcatggaaatcacctgctaagaagctgactaatgcattaagcaagtccctgagctgtgcttccagccgtgaacctttgcaccccatgttcccagatcagcctgagaagccactcaacttggctcacatcgttgatacttggcctcccagacctgtaaccagcatgaacgacaccctgttctcccactctgttccctcctcaggaagtccttttattaccaggagctctcctcccaaggacagtgaagtagagcagaacaaactgctggctagggctgctccagcttttctgaagggcaaagggatacagtacagcctgaatgtggcagacaggctagctgatgaacatgttctcatcgggttgtatgtcaacatgctccggaacaacccctcatgcatgcttgagagttcaaaccggcttgatgaagaacacaggctaattgccaggtatgcggcaaggctggcagcagagtcctcttcgtctcagccacctcagcagagaagtgctcctgacatctctttcaccatcgatgcgaataagcagcaaaggcagctgattgctgagctagaaaacaagaacagagaaatcttacaggagatccagagacttcggctagagcatgaacaagcttctcagcccacgccagagaaggcacagcaaaaccccaccctgctggcagaactccggctcctcagacagcgcaaagatgagctggaacagagaatgtctgctctccaggagagccggagagagctaatggtccagttggagggtctcatgaagctactaaagactcagggggcaggctctccccgctcctcccccagccacaccatcagcaggccaattcccatgcccatccggtcagcgtcagcctgctccaccccgacgcacacgccgcaggactccctcacaggagtagggggagatgtacaagaggcatttgcacaaagttcaagaagaaacttaaggaatgacttgctagtggctgcagattccatcactaacactatgtcctctcttgtgaaagagctgaattctgaggttgggagtgaaacagagagtaatgtggattctgaatttgcacggactcagtttgaggatcttgttccctcaccaacctctgaaaaggcttttctagcgcaaatccatgcccgaaaacctgggtacattcacagtggagctaccacaagtaccatgcgtggcgacatggttacggaggatgcagatccctatgtgcagcctgaagatgaaaactatgaaaatgactctgtccggcagctggagaatgagctccagatggaggaatacctgaaacagaagctgcaagatgaagcttatcaggtcagcttgcaaggttgaatgcaatatccttttatcacactcctctcaagcaagctatagtcagacagatgatgaaagtaacatgaaaactggtgatgatggagagccctgtggccacacagaggaggaagacagcagcctggcagcagcctcaccgaagagaggaaccaccacacccagcagctcctgacagacccccacccctaaagatgtgtcctgatgactatagtgcagctaactttttgttctcagatttgtagtgcataggtgtgtgtttcaagaaggaaaaaaaaagacttctgttcaaagttaacttatcagctacatcctctgtaacgtggttcatccctggttaaaaagcaaacaaacacaggctgaaaacccatgctgctgttatacacaatggcagtattaacaagcattttaaacctttgcacatgatattgaacctgttcagtttacaatgacaatattaatactgtttatagctagaagtttgatttctgaattctttgagattttagcaaaacagtttattatacactgtacatttttttcacagcaattggaaaaaaacaaccacttgcaatcattcaataaccctgaagaatttggttcctgagtgtacaaactcagagcccggaagccaagaagggtccttggcctgcacggtctgtagttgactccaagtctctgtgagcagtgacttgaaccaaacacaccaggaataatccattctttggggcctctttccaactcgaggttgttttctttcaagatactctaatcagccatagaatttagtgtaaatatttttttttccaaatagatatcatattcaaaaaaggcagcattcaaattatatagaatctagtttttaaaatcagcacagatcttcttaaaaactgtgaactatgttttgaaatactcgttactaaagctgtttataaaccacaggtgccataagatccccaaacggactaaagttatctctgctcttccatggtcttgttcctctcgttttggctttaggaagcatgtctttaacagcaccgctcgttcacaagttcccccatcaagttgtttggaggccttcagctttaaatgtacaggcttaaagtgcgcttgcaaacgtttgctctcctttttttctgaatgttgattgccttagctggccacctggtgttctgcatgtagccttctgtggtcatgtgaaaggagacaggctcttctaagttgagttgggatttttgcactcagtgaaaagctgaagtgcaaaagagctatcaaagacaagaggataaaagactgggatagtcttttccaaggaccctctttagagggccctaaagacctcctttgggaattctggggaaaaagaaaaagtaatcttctacttgcttcaagatttgatttttttaaaaaagcctgcgacctattcaatacattatgcttaaattagcagtttctctggaattcctgtctctcctttaaaagaaaggagagaacattttagaacaatagttctcaaagtgtgttccccggacaagcagcatctgcaacacttaggaaggtcttcgaaatactaatttgtaagccccacctcaggcctactgaatcagaagctctgggggttgggtccagaagtctgttttagtcaaccctctaggtgattctgatgctcgctaaaggttgagaactactgctttagaatgaagtcgtataataaagtctctgaaaaggccttattcagaataagcaagaaaggttctgtgattcacttttgcttctggggctggcaaaaaccttctctgaacccacacaccaagttcgtagttggtaggtgcccagccaagtcctgacatcttcatgccccctctgcagagggcggctgtacgatgttcacatgtctgcgtttggtcagacatcatctccttggctgccctttgaaaccaaatcacttgccttggggataaagtgctcaattggcattagtgagaagcccatcctatcccttgacatacttaatcatatatctctccagagaactcacctgacaaatgtctctgagcacaggctgacaccaaagtggcacaactgcacagttctcagatttctttgcacagattgatttttattgcgggttttgttggggtgtcttaatgttcatctcttttccactgcccatcctctgtgaacccatacctctctagatggagcaggtggccactggtgcctcatactcagtattgaaaaccactacatcccagctacctataatgctgtcagctcaaaatcatagccaggtagttcttgaactcagaacttaaatcctgcacgtggcactccaccactgactggaccgagctggcatatgttgtttctttgtgtttctacatcaaaatgttcgtctaagatttgaactgttctgctgataaccttccccgttgtcatagctatttcattgccaaccaactccatcacatggttgttgatatcgtcatataaagccattgcaaggactctggaaactgccgccaatgaccaatttctgactaaccagccaccttttctctctcttagctccacgtcagcactgagaccagactcgagcacccctgtcctgtaagcgagacaaaatggcgtgtgttattttggggttttgtgttttttggtgggtttctttccttggctctccagatttacttttggggcctgttctaagtgcaaacccagcaagtttcacttgtcctgtccattagatacaactacatcttgcgggggttgtttctttcttgttccacaatgaattgcacatccatctccatcagagctgatagcctgttaataagcactggtctaacacagccaaccctcctccacagcgccatattaatggaggaggggaggaaggtgaaatctactgcatgggattcaggaaacagttgtggttggtcaggacggaagttggggtaagtttggttggtcagagggagttgtgctggagattgtgaaaaatgggttcttgaatgatctactataaggcagggaaggttcatttgtaagtagtaatgtgaactgaattgcattaagagtgtgtggcctttgttgtgatatactatgtattttcttatatgcatgagccaaactgttgcatcataatttagcactgatgtctgcttttattttgatcatctttgtccacccttattagttcttggctgttaaccgtagatagatcttgtaaatccagcaacctttggttgctgcattccccttggttcgattccacgcaaggagccacaagtgagaactccactgtccttagaagaaagggcatttttacttttgaaccaaaaagagaaaaaaaaatcagaagtgttgcatcttgaggcgaattaactgtaagacatttttaattatgactactgcaatttgacaccatttgaaataatcaattcagagacactaaagatttcacaatattcattggtattgtaaaaaaaaaatactattgtatggatttttgtattgctgttaagtattgttttgtgtgtgtgtgtgtgtgtgtgtgttggaacctcctggggacatgttatattttgaagtgattaaactatttaattgtgtgtctatattttggagtggaataatttcttcattaaaaaatgtttttaaaaacactatatcttgggtggtttattcctttgtttcagtgaatctttcctaaagcaacgtggagtcagtctgttgaaagaaggaaggcaggtacttgcagtttaaagcaggacccattgatggaatattgagccaccgaggcaaaatagctcaccttctcttgccttgggggatgcatggtttttaccattctactgttttattagcatctgtgagcatctaatagaaatactattctgctatttatggaaatccttattataattgatatggaagtgagtttgaaattctaacagctaacatatttcatgtttgtatcacacactgttcttaacactttatgtgacttcactcaattctttgaatcctctgcatctagccatgtattctgcaaatattaagtgctcaatggtttttttgttgaattactgaataaatgaattagtggtgaaaaaaaaaaaaaaa

SEQ ID NO: 1018 - protein, 743 aa, Homo Sapiens
MIEDSGKRGNTMAERRQLFAEMRAQDLDRIRLSTYRTACKLRFVQKKCNLHLVDIWNVIEALRENALNNLDPNTELNVSRLEAVLSTIFYQLNKRMPTTHQIHVEQSISLLLNFLLAAFDPEGHGKISVFAVKMALATLCGGKIMDKLRYIFSMISDSSGVMVYGRYDQFLREVLKLPTAVFEGPSFGYTEQSARSCFSQQKKVTLNGFLDTLMSDPPPQCLVWLPLLHRLANVENVFHPVECSYCHSESMMGFRYRCQQCHNYQLCQDCFWRGHAGGSHSNQHQMKEYTSWKSPAKKLTNALSKSLSCASSREPLHPMFPDQPEKPLNLAHIVDTWPPRPVTSMNDTLFSHSVPSSGSPFITRSSPPKDSEVEQNKLLARAAPAFLKGKGIQYSLNVADRLADEHVLIGLYVNMLRNNPSCMLESSNRLDEEHRLIARYAARLAAESSSSQPPQQRSAPDISFTIDANKQQRQLIAELENKNREILQEIQRLRLEHEQASQPTPEKAQQNPTLLAELRLLRQRKDELEQRMSALQESRRELMVQLEGLMKLLKTQGAGSPRSSPSHTISRPIPMPIRSASACSTPTHTPQDSLTGVGGDVQEAFAQSSRRNLRNDLLVAADSITNTMSSLVKELNSEVGSETESNVDSEFARTQFEDLVPSPTSEKAFLAQIHARKPGYIHSGATTSTMRGDMVTEDADPYVQPEDENYENDSVRQLENELQMEEYLKQKLQDEAYQVSLQG

SEQ ID NO: 1019 - DNA, 12740 bp, Homo Sapiens
agggaagaagggagaaagagagagagatttgaatatacattgcttcaaggatgcaaaaaattacaacctggaaaaggcttcgagtaactttaggaaaatgagctgctggactcctcagtcaatctgtcctttctagtcaatgaaaaagacagggtttgaggttccttccgaaacggggccggctaatttagcccctcccacgagcccaagggtctgttatatctctgtttccttgaggacctctctcacggagacggaccacagcaagcagaggctgggggggggaaagacgaggaaagaggaggaaaacaaaagctgctacttatggaagatacaaaggagtctaacgtgaagacattttgctccaagaatatcctagccatccttggcttctcctctatcatagctgtgatagctttgcttgctgtggggttgacccagaacaaagcattgccagaaaacgttaagtatgggattgtgctggatgcgggttcttctcacacaagtttatacatctataagtggccagcagaaaaggagaatgacacaggcgtggtgcatcaagtagaagaatgcagggttaaaggtcctggaatctcaaaatttgttcagaaagtaaatgaaataggcatttacctgactgattgcatggaaagagctagggaagtgattccaaggtcccagcaccaagagacacccgtttacctgggagccacggcaggcatgcggttgctcaggatggaaagtgaagagttggcagacagggttctggatgtggtggagaggagcctcagcaactacccctttgacttccagggtgccaggatcattactggccaagaggaaggtgcctatggctggattactatcaactatctgctgggcaaattcagtcagaaaacaaggtggttcagcatagtcccatatgaaaccaataatcaggaaacctttggagctttggaccttgggggagcctctacacaagtcacttttgtaccccaaaaccagactatcgagtccccagataatgctctgcaatttcgcctctatggcaaggactacaatgtctacacacatagcttcttgtgctatgggaaggatcaggcactctggcagaaactggccaaggacattcaggttgcaagtaatgaaattctcagggacccatgctttcatcctggatataagaaggtagtgaacgtaagtgacctttacaagaccccctgcaccaagagatttgagatgactcttccattccagcagtttgaaatccagggtattggaaactatcaacaatgccatcaaagcatcctggagctcttcaacaccagttactgcccttactcccagtgtgccttcaatgggattttcttgccaccactccagggggattttggggcattttcagctttttactttgtgatgaagtttttaaacttgacatcagagaaagtctctcaggaaaaggtgactgagatgatgaaaaagttctgtgctcagccttgggaggagataaaaacatcttacgctggagtaaaggagaagtacctgagtgaatactgcttttctggtacctacattctctccctccttctgcaaggctatcatttcacagctgattcctgggagcacatccatttcattggcaagatccagggcagcgacgccggctggactttgggctacatgctgaacctgaccaacatgatcccagctgagcaaccattgtccacacctctctcccactccacctatgtcttcctcatggttctattctccctggtccttttcacagtggccatcataggcttgcttatctttcacaagccttcatatttctggaaagatatggtatagcaaaagcagctgaaatatgctggctggagtgaggaaaaaaatcgtccagggagcattttcctccatcgcagtgttcaaggccatccttccctgtctgccagggccagtcttgacgagtgtgaagcttccttggcttttactgaagcctttcttttggaggtattcaatatcctttgcctcaaggacttcggcagatactgtctctttcatgagtttttcccagctacacctttctcctttgtactttgtgcttgtataggttttaaagacctgacacctttcataatctttgctttataaaagaacaatattgactttgtctagaagaactgagagtcttgagtcctgtgataggaggctgagctggctgaaagaagaatctcaggaactggttcagttgtactctttaagaacccctttctctctcctgtttgccatccattaagaaagccatatgatgcctttggagaaggcagacacacattccattcccagcctgctctgtgggtaggagaattttctacagtaggcaaatatgtgctaaagccaaagagttttataaggaaatatatgtgctcatgcagtcaatacagttctcaatcccacccaaagcaggtatgtcaataaatcacatattcctaggtgatacccaaatgctacagagtggaacactcagacctgagatttgcaaaaagcagatgtaaatatatgcattcaaacatcagggcttactatgaggtaggtggtatatacatgtcacaaataaaaatacagttacaactcagggtcacaaaaaatgcatcttccaatgcatatttttattatggtaaaatatacataaatataattcaccattttaacatttaattcatattaaatacgtacaaatcagtgacatttagtacattcacagtgttgtgccaccatcaccactatttagttccagaacatttgcatcatcaatacattgtctagagacaagactatcctgggtaggcagaaaccatagatcttttgtgtttacagctatggaaaccaactgtaccataaagatagttcactgagttttaaagccaagccacatcttatttttccaaggtttaatttagtgagagggcagcattagtgtggagtggcatgcttttgccctatcgtggaatttacacatcagaatgtgcaggatccaagtctgaaagtgttgccacccgtcacacaacatgggctttgtttgcttattccatgaagcagcagctatagaccttaccatggaaacatgaagagaccctgcacccctttccttaaggattgctgcaagagttacctgttgagcaggattgactggtgatgtttcattctgaccttgtcccaagctctccatctctagatctggggactgactgttgagctgatggggaaagaaaagctctcacacaaaccggaagccaaatgtcccctatctcttgaatgatcaagtcacttttgacaacatccaggtgaatataaaaacttaataaagctgtggaaaggaactcttaatcttcttttctgctacttaggttaaattcactagatcttgattaggaatcaaaattcgaattgggacatgttcaaattctttcttgtggtagttgcctatactgtcatcgctgctgttggttgagcatttgtggtgtaccacgctgtgtgctcaagggtattacattcatcttctcatttaatcctcacaacaatctgaagaaggtaggtattacaattcccacttcatagaaacagaaactgaggttcagagaggttaagtcatttgcccaaatggctgagccaaagcctaccatgtacctaacctttattttctttcccgaacataccaggctgtctcctcataacttccaagcatgcacttaaaactccacatgaatacaaggttcatgggacttggtattcatagaaagggaggcagaaagctggtctgttcctgataggcttgtaatttaatatcattctgttcatgtgctttggatggaagcacatctggcatatgatgctaatcagtggttcccatacccctggcttcctaattttaatgtttgctcacagcatagtagattgacatcaaatagtggccgatgatgatgaaaataaaggtcaaataagttgagccaataacagccgcttttttccttctgtctgcgtatacaaagcactgtcatgcacacaatctattctgaccctcacaacaacccataagggtgtaaatagtatttccattttacaaatgaggatcacacaaactactacatggcagagcagatactccaactcatgtcttctggttgaagcctattgctttttcttttctaaacactttccctcagcaagttggaattagacttcacaagtctccttcagagaacacaaatcttttcttattccattcctgtttggttgcctacgtccaatctccccctccccagagatgccaaaaaaaaaatcctttaaggtatttgggagccaaactcaacttgttaaaatctcaaattatggagacaatcagcagacacaacctaaccccaattattttggcaggaaggttggtttagaggcagatccagcaatctgctttgggccactctgggtggggtaggtgaaataagattggtcactgttaactaattttaatattggattggccattggttatcactgattaccattctcccctggattttcacccaggactcaaaacttggttctgctaaccctgttcctttatgaggaaccttttaaagattcctttataaggtgggagttttttttctatgaacctataggggagaaaaaagatcagcagaagtcattacttttttttttttttttttttttttttgagagagagtctcactccattgcccaggctggagtgcagtggtgctatctcggctcactgcaacctccgcctcctgggttcaagcaattctcctgcctcagcctcccgagtagctgggattgcaggtgcccaccaccacacccggctaatttttgtatttttagtaaagacagggtttcaccatgttggccaggctggtctccaactcccaatctcaggtgatcctattgcctcgggctcccaaagtgctgggattacaggagtgagccaccatgcctggccagaagtggttacttctgtagacaaaagaataatgctacttaatcaggctttctgtgtgacaagaaagagaaagaaaataaagaagtttcaattcatccaattcttaataagaaatatgtaaataaaattttttaaaattacacttcattttaatgttgtatcagtcaaggtccctgcaagagatggatggtatggtacactcaaactgggtaacacaggagagttttcagaaagcaactaaatccaaaatactatcaaggaatcaatataaaaattgttaatatttttctcatactaaattttcaaaatattttgtgtctattacatttacagcacatcttaattaggactagctgtgtgttcacctcacatgtggcttgtagctaccatactggacagcacatgtccaaaaaaatacacgtaaagttaaagtttaaaagacacaggaactaagccctcattgtctttcccttgggaggtagtttaaagagctatagatgctgtaacattcttgctattatttattatatatgacattattcctaaaaaagcttttgagatcctaggttgtattcctcaggttttgttgccttcccatgaagatgtgaaggcagggatgcctgttattcagtccaagatgcatgacaagagaccttgggaaagtttcatctggatttaaagattaattcttgatgcttacattccatactcaaaatgtaaatttgaatattaaaataaagatgattttttttttggagctagtcttgctctgttgcccaggctggaatgcagtggcatgatcatggctcactgcagcctcgacctcccaagctcaagcaaggctacaggtgtgcacctaagtagctaggactacaggtgtgcaccaccatgtctagctatttttttttctgtagagacagggttttcctatgttgtccaggctggtctcgaactcctgccctcaagcaatcctcctgccttggcctcccaaagtgttgagattacaggcgtaagccactgcacctggccaagatgaatattttaatagctcacagaacaaagtttgccacataatgataaaattactatgaaaatatattccctttattgtcagtttaaaagatgaactgagtttcacccaaactggtctggcccctctctgattcaaataccaatagttgctctgattcaaattccaactgttagaacatgacagctgctcataactagctttgcttactaaccatgtttctttccatttgtattaggtcctttactttttataacagcctcaaagtttcatgaattgctgcagtaaacattgattttcatgtttgtgagtctgcaagccagctgggcagctctacttcaggtggtaagggtggatcagacctattccatatacctcttgttctccttgtccagtggtttctagggatatgttctcatgatgaaccccgcagaggctcgtgaaagtgagaggaaactaggatgcctcttaaggtcttggtcaggatggggtctcctgtcacttctgtcacaggctattgtaagtcatatgagcaagctcaataaaatataaacaagtcagataaacagtgggaggaatggcaaagtcatatggccaaggccatgagtgattaattttaacacaggaaaaaagtaaagcattaaatgcgattatttaatatacaatgtcttattaactgaaatataaaatgtgtttactgtaaaatataatctgtttatctcaccaaagaaatattatctttaaaaaatgtcattacttctaagacatcatcagtctgcaacttctttccatagccttaatcaggatgctgtggcagctcccacattagcctcgcattctaaactggtagatgtcctaggaaaccatacatctatgtatttttcttattttatacgtttaggacaatgtatagctaattacccaactttttatttgcatacaaatctaatacaactgaacacaatcagttttatcacaggtataatggatttttcaatagtgaggaggtgcctccatgagccttctctttagaaaagtggcattcaagactcttcatttgaagtgaagattgctatgtcttttgcattgctctattttacataaattaagttataaattgacactataatcaactgacaccatgatcagtgatgatgatcaccctcatcagcactagagttgacttgtttttataacccctttgcatgtatgttgaatagcaaagttcatcagagaacatgtattagtcaatggtaagtaagatactctcatctaagaaataacatcacctcttctaatgaagttctaagaagagagggaagaaaaagtcttgggagctagtcagggaatagtgtgtatttgcaattacctaaactgaactctaccattactcctaacccagttcctcctcctgtgttttacatgattaatgccacccctgcctcaatgaaccaagatcagctccatcactgggacctccccattctgcctgtgcaatatttttcttttttatttctccttctaatattactgttattgctccagtaaagagctgtaatatattttacctggactgataccaggaatggtggtgttgcttccaatctgttgctgctagattaatctttgcaaagcacaggcttaatttcattgctgctcaactaaaaccactggtggctttccattgcctacaaaataaagtcaacctccccatcagacattcaaggctttcaatgatccatggccgccagctctctccaggctcatatcccactccactcctctgatgtttcctacactacactacactatactacactacagccaggtagaatgactgttcacccaacaccactcaggttgtcttctcaacttggaatactcttgcaccttcaaagctcatttcaaatgccccttcatttgtgaagccttctccaaatttccaagtcagaatgtctcttccttgtgctaccacaaccctttaactgagcctccattagtgcactgagaccattctgttcagtgtctgggtgaagcttcctggtgaaaaatatgttacctatttctttctgaaaagttggattcagggatattatcacggacctaaggtaatagttctagccaacctccctgtccactgccaggccgactacaaacccttctgttgctggcgagctggtccgcaccactagttctgcttcactctatttatctcttgatgtaaccatcttctttctccaggttttaagaaccagcccaactcctggttccctgatgaagcttttattcccctagccacatggaacttttcctttttggaacatgcctttagtttctgtgtagtttgccatgcagcacttcattgtacacattattaaaacagaattttaaggattagaatgaaccttaaaagatcatgcatctcaaaatttaatgtacatacaaattacccagggattttgttgaaataaaaattatttaattttaattaatataaataattcagtaggtctggggtgaggcctgaggttttacatttccaacaagctgccaggtaaagccaatacatctgtccaggaatcacactttgcgtatcaaaggtctagatgacattatcattccaaagagtttcttttacaggctctcagatcagtgttcatccactacctgactactgtcattcacaggcattctgttccacagcaggccagctaacgtggtatttacaaagctcactcctcttatacaacaatccaagtgtttcttttgtcagttgtctgtgccccaggagatccctctctgccttgccttgccctctgcctttggagaccagcacctcatactcagtgaaggcctggagtgcttaagagggatttcttccagctctcttgccctggtcttcagtgtattagatgtattacctccatgctctcagtagaggcccataggaaagagtaggtaggttatgccagctcacacgcatcctttaaaaatggtttagaagtttagctggtttcttattactcctgtctatggatgtttccttctgtcactctactagggatgaaacagctaatcatgttcaatagttacatttagattggtttttaaaaactatgattgtattagttcgtttccatgctgctgataaagacatatctgagactggaaacaaaaagggtttaattggacttacagttccacatggctggggaggcctcaaaatcaggtgggaggcaaaaggtacttcttacgtggtggcatcaagagcaaaatgaggaagaagcaaaagcagaaactcttcataaacccaccagatcttgtgggacttattatcacgagaatagcacagaaaagactggcctccatgattcaattacctcccactgcgtccctcccacaacatgtgggaattctgggagatacaattcaagttgagatttgggtggggacacagccaaaccatatcattcctccctgggctcctccaaatttcataatcctcacatttcaaaaccaatcattccttcccaacagttccccaaagtcttaactcatttcagcattaacccaaaagtccacagtccaaagtctcatctgagacaaggcaagtcccttccacttacaagcctgtaaaagcaagctagttacctcctagatacaatggggggtacaggtattgggtaaatacagctgttccaaatgagagaaattggccaaaacaaaggggttacagggtccatgcaagtctgaaatccagtggggcagtcaaattttaaagctccataatgatctcctttgactccatgtctcacattcaggtcatgctgatgcaagagataggttcccatggtcttgtgcagctccgcccctgtggctttgcagagtacagcctccctcctggctgctttctcaggctgatgttgagtgtctgtagcttttccaggcacaagatgcaagttggtggttgatctaccattctggggtctaccattctggggtctaccgttctgggactgtggccttcttctcacagctccactaggcagtgccccaacagggactctgtgtgggggctctgccccacatttcccttccacactgccctaggagaggttccccatgagggctctgcccctgcagcaaacttttgcctggacatccaggtgtttccatatatattctgaaatctaggcagaggttcccaaatctcaattcttgacatctctgcacccacaggctcaacatcacatggaagctgccaatgcttggggcctctaccctctgaagccacagcccaagctctatgttggctcctttcagccatggctggagcagctgggacacagggcaccaagtccctaggctgcacacagcacagagaccctgggcccagcccacaaaaccactttttcctcctgggcctctgggcctgtgatgggaggggctgccatgaaggtctctgacatgacctggagacattttccccatggtcttggggattaacattaggctccttgctgcttatgcaaatttctgcagccagcttgaatttctccttaaaaaaaatgggtttttcttttctactgcatcatcaggctgcagattttccacatttatgctcttgtttcccttttaaaacagaatgtttttaacagcacccaagtcaccttttgaatgctttgctgcttagaaatttattccaccagataccctaagtcatctctctcaagctctaagttccacaaatctctagggcaagggtgaaatgctgccagtctccttgctaaaacataacaagggtcacctttacttcagttcccaacaaggtcttcatctccatctgagaccacctcagcctggaccttattgttcatatcactatcagtatttttgtcaatgccattcacagtctctaggaggttccaaactttcctacattttcctatcttcttctgagccctccagattatttcaacacccagttccaaagttgcttccacattttcgggtatcttttcagcaatgccccactctactggtactattagtccattttcatgctgctgataaagacatacctgagactgggaacaaaaagaggtttaattggacttatagttccacctggctggggaggcctcagaatcatggcaggaggtgaaaggcatttcttacacggcagcagcaagagaaaaatgaagaagcagcaaaagcagaaacccctgataaaaccatcagatctcgtgagacttattcactatcacaagaatagcatgggaaagaccagcccccttgattcaattacctccccctgggtcctgtgggaattctggaaggtacaattcaagttgagatttgggtggggacacagccaaaccatatcaatgattttgtactttaaccagctgaatggaagtacaatctcttgctatatgacacaataattatttgcaaaatgagtaaacatatcataaggaaattatttttacaaggtttgaaacctgaaatgcagtctattatcatacataactaaaaatagagcctcaataaacagattcccagttttgaaaatgcaacatttgtactccacattgtcagttttcttaggtatatttataaatactcctataaaaatgtaaagaaacacataatgtagattgctaattttataataacacaagttgattttgacatccaacttattaattatgaaatgacttttggcctagtaacaatgaaaatgggggcaaatacagataaatggtaattcttagaatgaactactcagcaccaattctaagtttttcttgatggtaaatcataatgttccctttctcctcggttctgcaatctataggcataccataattgtaatcaatagcttaaaaatatgtctctctgtcctattctgtatctgtatctcttggatttttacctttgcaatagtcaactgaaccatcttcttggagtactcatgaagatggaagtctacatggagaatacaggatgaatccactctgtctcctgcagtgaagtctgtttgaaggatgtatttggctgtcttctggacaggccattctaataacagaaacaaacaagttattttaaaacttattggaatattcaaatattaaccaaagtagaaaaatataatacacatccatgtgcccatcacagaacttcactgattatcatcatttagccagtcttgaagaagcaagtgctaattacaatcacaaatgaaacaagattcagacttcatgaagagcactgcgctataataaaagaagaaatgagcacatacattcttttactgacagtcaaatggtgaaggtgggcagaatcattatgtgatgcaacatggcaaaagtatacagacagtgcatccagaggaaggcaccttgctgaatgactagaatggaagtaggagacattttgcaggcccccttcatcctgcagggagaaccagaaccacagcagctctatttgcctattcctctttaaattacaaagttaaaatttgggagtagtagaaaatcaattggttatcttatagagtctcctagaatatttcattggcattgagaaggtggaaaatgcaaattatatactttaaaatgtaatttttgcttttcacatatgcttaaagcctaaaacctcttaataaacttcttctgaaatata

SEQ ID NO: 1020 - protein, 510 aa, Homo Sapiens
MEDTKESNVKTFCSKNILAILGFSSIIAVIALLAVGLTQNKALPENVKYGIVLDAGSSHTSLYIYKWPAEKENDTGVVHQVEECRVKGPGISKFVQKVNEIGIYLTDCMERAREVIPRSQHQETPVYLGATAGMRLLRMESEELADRVLDVVERSLSNYPFDFQGARIITGQEEGAYGWITINYLLGKFSQKTRWFSIVPYETNNQETFGALDLGGASTQVTFVPQNQTIESPDNALQFRLYGKDYNVYTHSFLCYGKDQALWQKLAKDIQVASNEILRDPCFHPGYKKVVNVSDLYKTPCTKRFEMTLPFQQFEIQGIGNYQQCHQSILELFNTSYCPYSQCAFNGIFLPPLQGDFGAFSAFYFVMKFLNLTSEKVSQEKVTEMMKKFCAQPWEEIKTSYAGVKEKYLSEYCFSGTYILSLLLQGYHFTADSWEHIHFIGKIQGSDAGWTLGYMLNLTNMIPAEQPLSTPLSHSTYVFLMVLFSLVLFTVAIIGLLIFHKPSYFWKDMV

SEQ ID NO: 1021 - DNA, 4691 bp, Homo Sapiens
gtcagtctggccggctccgtcctcccgtaggctccgctgtagctagcaatgtgacaccaggacgcactcgctctcgcgcgctctcccaggctcgttctccctcgccctctctctctcacacacgcacgcacacacccacctctcccataaacacacacacacacatgcacacccacacccacgcgcgcccgcaccgccccacgcgcacacactcctgcccacgcccacgcagcgctccgggaagtccggtccgggcgagagcgcgaaaggataccgagaagccacccgcggagagcgcagcggcgccctgggacgcggcgctctcccggcgctgctgcctcggcttggtctcggcctgcgggccgtcggccggcgatggccctggattatctactactgctcctcctggcatccgcagtggctgcgatggaagaaacgttaatggacaccagaacggctactgcagagctgggctggacggccaatcctgcgtccgggtgggaagaagtcagtggctacgatgaaaacctgaacaccatccgcacctaccaggtgtgcaatgtcttcgagcccaaccagaacaattggctgctcaccaccttcatcaaccggcggggggcccatcgcatctacacagagatgcgcttcactgtgagagactgcagcagcctccctaatgtcccaggatcctgcaaggagaccttcaacttgtattactatgagactgactctgtcattgccaccaagaagtcagccttctggtctgaggccccctacctcaaagtagacaccattgctgcagatgagagcttctcccaggtggactttgggggaaggctgatgaaggtaaacacagaagtcaggagctttgggcctcttactcggaatggtttttacctcgcttttcaggattatggagcctgtatgtctcttctttctgtccgtgtcttcttcaaaaagtgtcccagcattgtgcaaaattttgcagtgtttccagagactatgacaggggcagagagcacatctctggtgattgctcggggcacatgcatccccaacgcagaggaagtggacgtgcccatcaaactctactgcaacggggatggggaatggatggtgcctattgggcgatgcacctgcaagcctggctatgagcctgagaacagcgtggcatgcaaggcttgccctgcagggacattcaaggccagccaggaagctgaaggctgctcccactgcccctccaacagccgctcccctgcagaggcgtctcccatctgcacctgtcggaccggttattaccgagcggactttgaccctccagaagtggcatgcactagcgtcccatcaggtccccgcaatgttatctccatcgtcaatgagacgtccatcattctggagtggcaccctccaagggagacaggtgggcgggatgatgtgacctacaacatcatctgcaaaaagtgccgggcagaccgccggagctgctcccgctgtgacgacaatgtggagtttgtgcccaggcagctgggcctgacggagtgccgcgtctccatcagcagcctgtgggcccacaccccctacacctttgacatccaggccatcaatggagtctccagcaagagtcccttccccccacagcacgtctctgtcaacatcaccacaaaccaagccgccccctccaccgttcccatcatgcaccaagtcagtgccactatgaggagcatcaccttgtcatggccacagccggagcagcccaatggcatcatcctggactatgagatccggtactatgagaaggaacacaatgagttcaactcctccatggccaggagtcagaccaacacagcaaggattgatgggctgcggcctggcatggtatatgtggtacaggtgcgtgcccgcactgttgctggctacggcaagttcagtggcaagatgtgcttccagactctgactgacgatgattacaagtcagagctgagggagcagctgcccctgattgctggctcggcagcggccggggtcgtgttcgttgtgtccttggtggccatctctatcgtctgtagcaggaaacgggcttatagcaaagaggctgtgtacagcgataagctccagcattacagcacaggccgaggctccccagggatgaagatctacattgaccccttcacttacgaggatcccaacgaagctgtccgggagtttgccaaggagattgatgtatcttttgtgaaaattgaagaggtcatcggagcaggggagtttggagaagtgtacaaggggcgtttgaaactgccaggcaagagggaaatctacgtggccatcaagaccctgaaggcagggtactcggagaagcagcgtcgggactttctgagtgaggcgagcatcatgggccagttcgaccatcctaacatcattcgcctggagggtgtggtcaccaagagtcggcctgtcatgatcatcacagagttcatggagaatggtgcattggattctttcctcaggcaaaatgacgggcagttcaccgtgatccagcttgtgggtatgctcaggggcatcgctgctggcatgaagtacctggctgagatgaattatgtgcatcgggacctggctgctaggaacattctggtcaacagtaacctggtgtgcaaggtgtccgactttggcctctcccgctacctccaggatgacacctcagatcccacctacaccagctccttgggagggaagatccctgtgagatggacagctccagaggccatcgcctaccgcaagttcacttcagccagcgacgtttggagctatgggatcgtcatgtgggaagtcatgtcatttggagagagaccctattgggatatgtccaaccaagatgtcatcaatgccatcgagcaggactaccggctgcccccacccatggactgtccagctgctctacaccagctcatgctggactgttggcagaaggaccggaacagccggccccggtttgcggagattgtcaacaccctagataagatgatccggaacccggcaagtctcaagactgtggcaaccatcaccgccgtgccttcccagcccctgctcgaccgctccatcccagacttcacggcctttaccaccgtggatgactggctcagcgccatcaaaatggtccagtacagggacagcttcctcactgctggcttcacctccctccagctggtcacccagatgacatcagaagacctcctgagaataggcatcaccttggcaggccatcagaagaagatcctgaacagcattcattctatgagggtccagataagtcagtcaccaacggcaatggcatgagaactcttgtttcttggggaaggagaggagggaaaaggaccagggtcaagggggaccagaggttgaccactgtggaatgtactggagagactggcttctcagctgaggaatgcatttccatcagtgaagaatcaaccggacctgttgctagcaggcaatctccatttctcagtgacagaagcatgtttgagatgccgtgggaaaccaaatatataataataaaaatataaaaaggtgatgttcaacagaagtgaagacaaaacaatatgcatcaggagaacaagagtaaacccagctcccactctcagtgggctgcagttgcccaaccacaggaagaaagggaaggaggtagagggaagaaacagaagcagtgttccattttcttcctcaccaatgacattcttttcttttctcctttcgtactcctccctgagagtcccctcccttctcccacactcgtttccctttgctcatgactcctgtagggaagtttcttcaaacaaaacccagctcctgagtctccagatgttgttctgtcagttgccaaaggactttgctgaccactgcatggggatccaaccaattcaattaatgtcttcatattgaagaagagatgtaccttcaattgaaaacctcgtttttcttttgtttgcattttctgcaaaaaggaaaaagaaaccacaaattggggaaaaaaaaagaagaaaaacctgtttccgtgtgcaaaagcacacatatgtatgtctgtgttataaaatgactgtgcttgttcgtaacagatgcaaacaagaaagaagaactgggaagtctttgtccctaggaaatccaaaggggctggaatatggtgttggtttggctttctggttggcccaatcggcctattggctcaatgggaagagaggagagggagaaaaataaaatgaaaggaaaaaaaaaagtttgcaaattcagacaggaaacaggtgagtggtttgaattggatgcagtgtgggccatcctggaatgatactgactgattaattattcctgataacatctcaagaaaaggagaaggaaagtgtttctggagaatgttctttcacatcactggaatctgcaattcaagaagtgacaagggagaattcttgctttacctatggactggcttaagccgtgtggcatccgaggaatgtttcaaatgtgtctgtgtttctctttacattccttgttgtacctcattgttcaattcacttttgtaaattccacctaacatttaattattttaaatttctccttttaccttaatctccttgctaattttatctgtctaattaaaaagagcagaagcatgtctgggtttacgtaaaaaaaaaaaaaaaaaa

SEQ ID NO: 1022 - protein, 984 aa, Homo Sapiens
MALDYLLLLLLASAVAAMEETLMDTRTATAELGWTANPASGWEEVSGYDENLNTIRTYQVCNVFEPNQNNWLLTTFINRRGAHRIYTEMRFTVRDCSSLPNVPGSCKETFNLYYYETDSVIATKKSAFWSEAPYLKVDTIAADESFSQVDFGGRLMKVNTEVRSFGPLTRNGFYLAFQDYGACMSLLSVRVFFKKCPSIVQNFAVFPETMTGAESTSLVIARGTCIPNAEEVDVPIKLYCNGDGEWMVPIGRCTCKPGYEPENSVACKACPAGTFKASQEAEGCSHCPSNSRSPAEASPICTCRTGYYRADFDPPEVACTSVPSGPRNVISIVNETSIILEWHPPRETGGRDDVTYNIICKKCRADRRSCSRCDDNVEFVPRQLGLTECRVSISSLWAHTPYTFDIQAINGVSSKSPFPPQHVSVNITTNQAAPSTVPIMHQVSATMRSITLSWPQPEQPNGIILDYEIRYYEKEHNEFNSSMARSQTNTARIDGLRPGMVYVVQVRARTVAGYGKFSGKMCFQTLTDDDYKSELREQLPLIAGSAAAGVVFVVSLVAISIVCSRKRAYSKEAVYSDKLQHYSTGRGSPGMKIYIDPFTYEDPNEAVREFAKEIDVSFVKIEEVIGAGEFGEVYKGRLKLPGKREIYVAIKTLKAGYSEKQRRDFLSEASIMGQFDHPNIIRLEGVVTKSRPVMIITEFMENGALDSFLRQNDGQFTVIQLVGMLRGIAAGMKYLAEMNYVHRDLAARNILVNSNLVCKVSDFGLSRYLQDDTSDPTYTSSLGGKIPVRWTAPEAIAYRKFTSASDVWSYGIVMWEVMSFGERPYWDMSNQDVINAIEQDYRLPPPMDCPAALHQLMLDCWQKDRNSRPRFAEIVNTLDKMIRNPASLKTVATITAVPSQPLLDRSIPDFTAFTTVDDWLSAIKMVQYRDSFLTAGFTSLQLVTQMTSEDLLRIGITLAGHQKKILNSIHSMRVQISQSPTAMA

SEQ ID NO: 1023 - RNA, 1740 nt, Homo Sapiens
gacaaagacaacggcccacagcgcacgacgcccgcggccaccccaagggggaacggccgcacaggcggggggacccaccgcggccacagacagggcgcccgccaccacacgcgcagccaaaggagaccccccccgaggcccgcaggcacacccgagggaggaagcccaaaccaagaacgggccacgccccgaccggcggccaggagggccaccggagggacgcagaccgggcaggaagcggcgcggacccgcacgcgcgcgcccacgacggcagaccccacgcacgccgcggcgcagagggccacagcccggcacgggggggagcgcaccgacggagccgcggagcaggacaaagacggcgccaccgccacgcaccgcggcgagccgcggccacagcaagggccagcggcgcgcgcacggcggggagaccggcgaccgggggcgggaccgcgcgacgacgccgccgagaacggggagcagaggcgccagaccggaggaacggcgcggagcggaagccgcgaccgcgacgggacgcggccgcgaccgcggaccaacggccacagccacgcacccacgccgcgcacggggagaaccgagcaggagcacgcggcccccgggaccaccgggagcggaggcgaagcagccggacaggcagcccacccaacaccacgggcggccagcccgaacgacccagccgcccaccagcaccccccaacacgacccgcccccagccacccagcacaagggccagcacccccacggggcccagcacagagcgcagacaacagagcacaggacagcgaacccagagcgggccgccggggcacgagggaagcccaacccccaccacccccacccagcccccccgccacccccgcccccaggcacccaacgcccccacccccaccagcacccaccccaagccccggggaccacaggcagcgacacacagcagaccaagaacaaacccgccacgggagacagaggccccaagaaggagccgagcccgcgacggccacgacgggcacggaggcaggacccagccgcaagccccgcgccagcaagcagcccagcacgggggacacaccggcagcgggccgcgccccggcgagacgcggcgcacgcccgggcaggcgcaccgcgaggaggcggaaccccgggaaccacggccaacggcgcgccgcggaccccaaggcgccagggagcagcagcgccgccgccgccgccgccgccgccccgcccgaggccgcgagcgccgccgccggcccgcccgcccccgagggcgcggcccggcgcgggcagcgccgccccccgcccaccggcagcaccaagccaacggagcccgagggcgacaaccggagcacggcgagaaaggcaggcaagagccgaagccgacgccacagagcaaggggcgaccacaggccaggcagcaggcagccggccccagcccgaggccgcgccgcggcaccgcacgaccagccggagccccacaccgccagcgcggggcagccgcgccaacggaagcggccgggccgcccacacccgcgccggggggcagcggacgggaggcgccaccccacgcacgagagcagggccgcccaagcccgagggaagcgccagggagggggcaagagcagcgaagaggaggaggaggaggagcagaggggaaagaggaggaggaggcccggcggccagcagcccgccggagggggaccccgcggaagaagcggaagaagagag

SEQ ID NO: 1024 - DNA, 5115 bp, Homo Sapiens
aaagcgagctgaaccctgaggggagccgctgaccagcagcatggaggaccccgccgcgcctgggaccgggggcccgcccgcaaatggcaatggcaacggcggcggcaaagggaagcaggcggcgcccaagggccgcgaagcgttccgaagccagcggcgggagtcagagggctctgtggactgtcccactctggagtttgagtatggagatgcagatgggcatgcagccgagttgtcagaattgtatagttacactgagaacctggaattcaccaataacaggaggtgctttgaagaagatttcaagactcaagtgcagggcaaggaatggctggagttggaagaagatgcccaaaaggcctatataatgggactcttggaccggctagaggtggtcagtagggaacggcggctgaaggtggcccgggctgttctctacctggcccaaggtacttttggggaatgtgattcagaggtcgatgtgctacactggtccaggtacaactgcttcctgctgtatcagatggggaccttctccaccttcctggagctactccacatggaaattgacaacagccaggcctgtagcagtgcccttcggaaaccagctgtctccatagctgatagcacagagctcagggtgctgctgagtgttatgtacctaatggtggaaaatattcgcctggagcgagagacagacccctgtgggtggagaacagcccgggagaccttccgcactgaattaagcttctccatgcataatgaggagccttttgcccttttactcttctccatggttaccaagttctgcagtggcctggctcctcacttccccataaagaaggtcctgctcctgctctggaaggtggtcatgtttaccctcggtggatttgagcatctgcagactctcaaagtacagaagcgggcagaattgggcctgcctccactggctgaagacagtatccaggtggtgaagagcatgcgtgctgcctccccgccctcttacactcttgacctgggagagtctcagctggcacccccaccctccaagctgcgaggccgccgtggctctcgaaggcaactcctcactaagcaggacagcctggacatctacaatgaaagggatctcttcaagactgaggagcccgccacagaggaggaagaggagtctgctggtgatggagaacgaaccttggatggagagctagacctgctagagcaggaccctctggtgccacctccaccctcacaggcacccctctctgctgagcgggtggcttttcccaagggcctgccctgggccccaaaggtcagacagaaggacattgagcacttcttggagatgagcaggaacaagttcatcggattcaccctggggcaggacacagatacattggttggattacccaggcccatccatgagagtgtgaagaccctaaagcagcacaagtatatctccatcgcagatgtgcagatcaagaatgaagaggagctggagaagtgccctatgtctttgggggaagaggtggtaccagagacgccatgtgaaatcctctaccagggaatgctgtacagccttccgcagtatatgatcgctctgcttaagattctgctggctgcagctcccacctctaaggctaagacagactctatcaatatcctggcagatgtcctacctgaggagatgcccatcactgttctccagagcatgaagctgggcatcgatgtgaacaggcacaaggagattattgtaaagagtatctctaccctgcttctgctactcctcaaacacttcaaactcaaccatatctaccagtttgaatatgtatcgcaacatttggtatttgccaactgcatccccttgatcctgaagttcttcaatcaaaatatcttgtcatacatcactgccaaaaacagcatctcagtcctggattatccttgctgtaccatccaggatttgccggagcttactactgaaagtctggaagctggagacaacagccagttctgctggaggaacctcttttcctgcatcaacctcctgaggctgctcaataaactgaccaaatggaaacattcccggaccatgatgctggtagtgtttaaatcggcaccaatcttaaagcgggccctcaaggtcaaacaggccatgctgcaactttatgtcctaaagctactaaagttacagaccaagtacctggggcgccaatggaggaaaagcaacatgaaaaccatgtcagccatttaccagaaagtgcgtcaccgcatgaacgatgactgggcttacgggaatgacatcgatgccagaccatgggacttccaagcagaagaatgtaccttgagggccaacattgaggcttttaacagccgtcgctatgacagaccccaggactctgagttttcacctgtggataactgcttgcagagcgtactggggcagaggttggatctgcctgaagatttccactattcatatgagctctggctcgagagagaggtgttttcacagcccatctgttgggaggagctgctccagaatcactgactaagttcttgtcaacaagcatcaatagatagaggtcagctccaataaactgtgctctgcctaccctgtccatacaggcgctgttaccagttcagggctcttctgggggctcttgggcctaaagatggtgcaagggtgggatcctgaatcacaataaaatgatcaacttgccctggggtcagttgggtgcccagttggccttggaaatcttttggtggatcaattctagacaagctctttggtaggaccttttcctgctttagtcttggctacaaccaggctagactttgctggctctaaaagaggaaatttgttatggcatttgacccatggcattcatcacagatagtgggaggtacaagtcataaaatagggagaaagttttcttcttgctcacactggattcctaggacttatcagagatttggaaaaaccaactttgaaattaagtttgcattttaaatttcaaatttggaagcctctttctgaaatcattagctctaagattattttagagcacctgcaccttctttgtgaaggatgatgatttactattccctcaatactgcatgttatcgaaaagtgtgttgtgtaaagtgtttttttcctcattctgtaagagatctatattcaatgtgaaaattatttccttgtgtactctgtatagggcatggaatgctctgccatttttaaagagccacaaccaatatgaaataattaggtcctctctaaggatgtttcatgtttttcttaaatgactccagtcttcaaatggctgagcatactgcagaaaattatccttttcatctaattcattttttaaatgacaagttaactacaggaggctttatttattcagatggtatgtccacttgtggtcgtgatcaatatatttttctaattgaaaagtaaaagcatcacagcttaccatttttctttttctgcagtgttgattaatgatttttttcccgtttattgctagcagtttcaaagtgtcatgtggagatttagcaatactgtctctacttaaaagtattgcacatttcattgaaaatgtgagagttgatataccagcctctttatatttctcttttacagcagaatcacatacttctcaagataaacaaggtttttaaaaaagtttctgatttagttaggatcatatgcttttttttttttttttttttttttttttttttttgagacagagtttcgctcttgttgcccaagctggagtgcaatggcacgatctcggctcactgcaacctccgcctcccgggttcaagcgattctcctgcctcagcctcccaaggagctgggattacaggcacgcaccaccatgcctggctaattttttgtatttttagtagaaacagggtttcaccatgttagccaggctgacctcaaactcctgacctcaggtgatccgcccgcctccacctcccagggtgctgggattacaggtgtgagccaccatgcccagcctcttcaagcttttttactatacatgttgcccctctcccccaacttaggcactactgaattttttatgatggcaccaggtcactttatgctgggtgatatagtcaaaatttgcttatttactctgcccctcgtcaaccacagtatcatttcaaggacatgaataaaatacttgacagtatccaaaggagctataccaaaatctaacaagtaaattttggattttgcctctttgtgctttaaagtaccaggatttctgtctctatggataggtcttggagaatgttaagtaatggatgaaactttttaaaataatttgtaaattttacctaagtaggacagtagtccttactgcaatcaaaataatttactgagcacaactcctgtaaattaatctacagtcaggctagtatgattttaatatgatttgagtaaaaagataattttcaaggaaagagtaatcatccatcaatttattataaagccagatagtattcaatttatgtcaagaacaaagaaattgcccttttaaaagcatgtacgtgaatgctttttgaggcacagaagtatgctaagctttaacattttgtatttatttacaacccttttctaagggaaggttacttctcagtgcagatggagaaactgaagcactaaggataaatgattagtttccaatcacatcatttttttccacagacttgctgggactagctttcaggtattgacagccagccccatatattaaggtaaccaggttgaatcttccaatttgagaacccatgtatgggttgcagtgagccgagatcatgccactgcactccatcctgggcaacaagaacgaaactccgtctcaaaaacaaagaaggatataataaagttaatatataaaccatgtatgtggttaggaataaattcaaattcaccagtctccaatggtgattacttttactacatagaaaaacattttagtgacttacagaggatttttatttgtgaatatttcagtaaagtttgtgttgattgttgataacactgttcatctactgaagcactttaataaaaataaaatgagctggaattagaaa

SEQ ID NO: 1025 - protein, 834 aa, Homo Sapiens
MEDPAAPGTGGPPANGNGNGGGKGKQAAPKGREAFRSQRRESEGSVDCPTLEFEYGDADGHAAELSELYSYTENLEFTNNRRCFEEDFKTQVQGKEWLELEEDAQKAYIMGLLDRLEVVSRERRLKVARAVLYLAQGTFGECDSEVDVLHWSRYNCFLLYQMGTFSTFLELLHMEIDNSQACSSALRKPAVSIADSTELRVLLSVMYLMVENIRLERETDPCGWRTARETFRTELSFSMHNEEPFALLLFSMVTKFCSGLAPHFPIKKVLLLLWKVVMFTLGGFEHLQTLKVQKRAELGLPPLAEDSIQVVKSMRAASPPSYTLDLGESQLAPPPSKLRGRRGSRRQLLTKQDSLDIYNERDLFKTEEPATEEEEESAGDGERTLDGELDLLEQDPLVPPPPSQAPLSAERVAFPKGLPWAPKVRQKDIEHFLEMSRNKFIGFTLGQDTDTLVGLPRPIHESVKTLKQHKYISIADVQIKNEEELEKCPMSLGEEVVPETPCEILYQGMLYSLPQYMIALLKILLAAAPTSKAKTDSINILADVLPEEMPITVLQSMKLGIDVNRHKEIIVKSISTLLLLLLKHFKLNHIYQFEYVSQHLVFANCIPLILKFFNQNILSYITAKNSISVLDYPCCTIQDLPELTTESLEAGDNSQFCWRNLFSCINLLRLLNKLTKWKHSRTMMLVVFKSAPILKRALKVKQAMLQLYVLKLLKLQTKYLGRQWRKSNMKTMSAIYQKVRHRMNDDWAYGNDIDARPWDFQAEECTLRANIEAFNSRRYDRPQDSEFSPVDNCLQSVLGQRLDLPEDFHYSYELWLEREVFSQPICWEELLQNH

SEQ ID NO: 1026 - DNA, 4063 bp, Homo Sapiens
gttcttctttctacctttctaagattccaccatgttgcttgtttagttcaaccagtgctgatagggacacgtttgcacttgtctctcagtgaacattcgcaagagattttctaggcctccaggcagaagccgctgctgacggggagagtctgctggaggaagtcacatggcagatgccagaggaccagcctgggagaggctttctagcaaccaggacacctgccgcagtgccacgctttctccaggaaacaaggacagctgcacgggtgcccacacgagagtcggcgaccagcctcggcggtggggttcctgcaacgcgtgttcctgctggggttctcctttctgctgttccgagctacagtgcggatcatgctccccatacgtggagtccagggacagcacagcccggggactgcccagccagccaggaagtctggctttcagagaactgggaagaccatcttccactttatcccatctgggagactgtaaacatggattccactgtctcggacagtgagacgattcccagtcttttcctgttcctcctctaggtatgtagctgctatcagcttccagaaacgctggaaggaagggcgttgctttggcaggacacgtggggagatgggctgggaggggagatcccggaggtaaggaggggaggctttcctctccccacactgggaactcagtttctagccccaggttcctggttgtgtccggcatcccaggagcatgagtgggaagctgctgcatccacctgccgtgtgcagtcggggaccagctgcagagcgcactatgcatcctttagactctgcaggctcaagtgaaaacccagctctgccactgctctctggatgaccttgccacctccctctcctcctttgaaaagtgtgggaaatgctgcttttcatcaagtccaagtcaccatgtattgtggcttaaacggcagtgttattttctttctcagtgacacataacatactgctgcgttttttaacagatgctgtcttggacgcagtgaagtctgccgatggctgtttcagagccgttaggatggtgaagtgagacaatgtgaatggagtgttttgtgaggctcagtgctgcataaatgctagccattatctaatagcaagaattccttgaaatgtttctttctctcaaatttatgaaaagattagaaaatagttctaaaaattaaaaatgcttctggtcggagcggcttacatgatggcagtgaaagtgtgcagcttcatgggtcccactgcgtgcacttggcatggagagaacgaaatgtggaggccagcgataccaagaacacccctgtgagccgcgctgggtgcagcccccacggccggcgggcagtgacaccgcagtttcctctcctgccggcgtccacgcttcctgtgcccaggtgctggaagctcagtcttcatgtccccttctcagttatgtgtctgtggggctgggacagggaaggaagtcagtgaagctggttggatcttccaagggatgctctgtgtgcaaggctcggggacaaggatggctgggggagtcagactgtcagtgaagctgaggggcggatggagcctcaccacgcctgagtccctgttttccagctgcagatgctgaccctccagagctttgtttaccagcccctgtgactgcgatctggagtcagccaggcgttcctccttgtccggtagattttattaagtgctcaatgtgtgccaagccaaatgtccgtttgacttactgcatgtccgagaagcgatgccgttgaaggaatttcctccccaagcctgaaggaattgaacaccaggaatgactggaaccctggagagagagaactggatttctggaggaaaatcactcgttttaaggaagcagcatcctggacccttgaggccctggaggaagcgggcagcacagctcggaggcgggtgtggctggaggacggccgtcgcacctgcgaaattctgtctgtggtacgtggttccttcctggctctgggaaccacctggatacttgcattcttcccttttcctttctattctctttcaagtcaccctccttgagacagccctccagtccaggccaaatctcagcctgcccttggtccgctgtggttgggcctgcacccaagccatgagcacacgcagcaattgtggcagcagaagcttcctctgggctcagactcaggctgatgctgcgtcaggactgccgcggtctcggctgggcttcctgggactcggtggttgtgggctgattgtaaagcacggaatgactcttagaaactgggcgtcattctttgtggttttccaagcttggtctctgatgatactccaggtcttaggagacatgctgaatatttattatgcttacattcaagcaacattaacccttaaggttgatgtagctccccgtctttttttcccagaaggaggagcactgaaggaacacttttccagtatggattctttccagctccgagaagctggaggcacacggatccctcggccagctctcatctatggacgtgctgtagtcacaaggactgtgactaaggctcagtccctgaagagtgccttggcatgggctgctttaggctgtaaacacccagttttatccactttatgtgaagaaagccaacaaggggcatggagtgagttccgcaggttttagtggctgcggaggctggtgctcagtggggatgatggagggaaggcgcctccctctgcgggccccgaggtctgtgcgggaatcagctctgcagttgtgtccaggggcagccgtagaccacacacggcaggctcacagctctgttccatgagaactttatacacaaaagcagacgggctggcttggcctctggatcataatctgctgacccctggggcaacgttggctgcagcggagatggctgctccccggtggggtgtgtgctcagcccgcagcccccgccctccggactccgttcgcctctgctctcagctttgcacctcgtcattgtcttctaattgtgcatccctggactgcgtgacctacaaggctctcagcacaacaagactctatgattctgtctattggaacaaaaagccagtgaggcaagtgtatcatcctgttgatgaattcacagaattaactctgggagttggggacagtttgtattcttcttccagacactctctgtttctgctggatggaaaggttctgctacttgtcctgtggtcaggcccagctgatggaatggaatggaagtgactcagccccttactggcagaaactttaaaagccgcacaacattcctgcaccctcccctctgccatgagcctggcagtgctcaggatgggaaaattatttcacctgggcctgaggatacaggagctactcccagcgtgcagtggaagagaagcatgggcaagtaattaaactttgtgttttcaagccacagaggttttttgaggttgtttgctaccatgctttgtccctacaaacacagtcatggagaaggccagtggcagagcctgagccgttcgtgcatctgttcaccagcatccagaataacaatagatttttgaaacattcctgagaaaattctgggagttgcataccggccagtcttattccctaaagttgttccttctaaagggtgggatgaccaaaaatttcagaaaagcaaaccaccgctgaaaggcaacgttatttctgttggcagaaggcggcctgagcaatctagattttccacggttcgccaactagtttttaaggaaatatggctgtgagaggaataaaacataattcctacctttaaggaactcagagaagtgaattaaaggaagtcacagatcaggcaaccaaccacacaaagtttctaagagcaaactgttcaggtcggcaagtcactcttatccactgttttgccttctgaggtttcagttactctcagtcagtcatggtccaaaaacattaaatgaaaaattccagaaataaacaattcacacgttttaaaaaaaaaaaaaaaaaaaaaaaaaaaaaaaaaaaaacaaaaaaaaaaaaaaaa

SEQ ID NO: 1027 - DNA, 5722 bp, Homo Sapiens
atttttaacttcgcaacacttggactatttctgttgaagttttctctcctttccctgccttcccaacagaacgctgtcctctactgcagctgatgcaacccagccacctcccggcaatccgcttacttgcaatcaagggttcaggtgcaagcagatgctgactcagcctgttccattaagagctaagaagcaagaagaaattggggcgccatggggaaagcccgcagatccccgccagggcaccacaggcattgtgagggatgcttcaaccgccactgccacattcctgtggaacccaacacctcctgcctggtaataagctgccacctgctctgtggtgccaccttccacatgtgcaaagaggcagagcaccagctcctctgccctttagagcaggttccgtgcctcaactccgaatatggctgccctctgtccatgtcccgccacaaactggccaagcacctgcaggtgtgccccgccagcgtggtctgctgctccatggagtggaaccgctggccaaatgtggactctgaaaccacccttcatgaaaacatcatgaaagagacccccagtgaggagtgtttggacacagccctggccctgcaggatcagaaggtcctcttcagatccttgaaaatggtggaacttttcccagaaactagagaggctactgaggaggaaccaactatgaatggtgaaaccagtgtggaggaaatgggaggagcagtgggtggagtggatatcggtttggtaccacatggtctgtcagcaactaatggggagatggcagagctaagtcaagaagaacgggaggtgctagccaaaaccaaagaagggatggacctggtcaagtttggccagtgggaaaatattttcagcaaagagcacgcagcctctgctttaacaaattcatcagcgagctgtgagagcaagaacaagaatgactccgagaaagaacagatttccagtggccataacatggtagaaggagagggcgctcccaaaaagaaagaaccacaggaaaatcagaagcagcaggacgttcgtacagccatggaaaccacagggcttgccccttggcaggatggtgttctggaaagactgaaaacagctgtggatgcaaaggactataacatgtatctagtgcacaatgggcggatgctgatacactttggtcagatgcctgcttgtacacccaaggagagagactttgtttatggcaagctggaggctcaggaagttaagactgtttacaccttcaaagttcctgtgagctactgtggaaagcgagctcgacttggagatgccatgttgagttgtaagccaagtgaacacaaggcagtggatacttcagatttggggatcactgtggaggacctgcccaaatcagatctcatcaagaccaccctccagtgtgctttggaaagagaactcaaaggccacgtcatctctgaatccagaagcattgatggactgttcatggattttgccacacaaacatacaactttgagccagaacagttttcctctgggacagtgctggctgacctaaccgctgccaccccagggggactccacgtggagctccacagcgagtgtgtgaccaggagacacaacaaaagcagctctgccttcactttcacttgcaacaaattcttcaggagggatgagttccccctgcacttcaagaatgtccacacagacattcagtcatgtctcaatggctggttccagcatcgatgccccctcgcctacttgggatgtacatttgttcaaaaccatttccgtcccccagggcaaaaggcaaaagtaatctatagccaggagctcaagacctttgccattaagccggaggttgctccagagctgagcgagggaaggaagaacaaccatcttttgggtcatggaggaaaaagccagaattctttaaccagcctgcccctggagattttgaagtacattgctgggttcttggacagcgtcagcctggcccagctctcccaggtgtctgtgctgatgaggaatatctgtgccactttgttacaagagagaggaatggtccttttgcaatggaagaaaaagaggtattcccatggaggcacctcctggagagtccacagagagatctggcagttcagcagcctcttctccaaaatcaagagctgggagtttaatgaagtcacctccatgtctgagcacctgaagtcctgtcctttcaacattgtagagcacaaaactgacccgattcttttgactagcatgtgtcagccccgtgagcaggcccgagagagcttagtctccacctttagaatcagaccacgaggaagatacgtctcctaaaaattcagatgccactcgatgcacccttcttggatttcttctcggagttcctgaagtaggacagagtgtgtggttttgaggactcccttctgtaaactgcctatttgcttatcggggtgtattggaacacgcaatgtccttcgaaacctcaacacgaggcctaagaatttcctaagccatgtcttgtaccatagtgccacattgatgacttgtttccttttttcttttcttttcttttcttttttctttctttctaaaatagattggtctgagaagaaaataagtaatttgaggccatttggaagatgggcccaatttcttaagtgatgagagagcacgaaattccataaccagtacaggcctgtgcttttacatgggctttttagttcacaaagcactttcaaatttatgggacaggaaatgcaggatgggactccccagggaacgcagggtgaagggaacaaagctggaggctctggagctgggtctgttttgacggtcaagtccagggctcattttggttattctactgcctctaggccagggtagtcctaacacagcctgacataggagagcccctggctgagcatggcagccttgaagacaccacaggccaaaacatgaggggcagaaatgggatcacagagtctgttgctagaatcttggcaacatacagcaggaaagccttgataaatcgggagtccaaaggagacaccatatttatggagaacattaggacaaaaagtcaccaacttactttgtaacattttaataatgacttaagggtcaagatttttttcttctgaaaattatgttctgagttaggcagaacatagccatggccctgggccaccctgtgctatctgaaatgacctcaatacactaatgccaacctcagcgtcatgccagaatgcacagggcagcccagggagatcacacctttggcaaagtccagacaaggcccactgcagttcctatggcgccagtcaccagctcctagacagcacttgggtaccccattggggtcttggagaggaagacatgtgaacataacggctccctgaaattgctcctacccatccatatttctggtcatgctttcagtctgacaaaaatggatgatactgctgtttttggtaacaaacagtgaatattcataagaacaaaagtaaaagaaaaaaagacacagtagaaactggcatcccctaaagcagggcttcttagccttggaactattgacatttttaaatggataattctttttttttttttctaggtggggaggggatggagttcactcttgttgcccaggctggagcgcaatgacatgatctcggctcaccgcaacctccgcctcctgggttcaagcgattctcctgcctcagcctcccgagtagctgggattactcgcctggctaattttgtatttttagtagagacgggctttctccatgttgttcaggctggtctcaaactcccgacctcaggtgactcgcccgccttggccttccaaagtgctgggtttacaggtgtgagccactgcgccctgcctgaactggataattctttgttgcaagggactgttctgtgtactacaggatacttggcagcatccttggcctatccattaaatgtcagtagcacccccacagtggcaacaatcaaaaatgtcaccagacattgctaaatattggggagcaaaatggctccccgttgaaaatccctaaaggatgtcatactagtgacaataagttaggatatgcttattttttagtacagcaaaatcttatcgcacatagctatccacaatagttatgatttaatgcagctctttatttatgaaataggttttagacatgtggtgattttaagttgggaaccagaaggaaatgattcgtttggtatggcttcatgtccttcagccacccccaagaatgtatcctttcagctctctttggttatacctgaagccaggagcgttgagttattagccttgtgtttatattcctctcactgtaattggtgtcattttcccagcagtcctagcagtcctcaagcaagtgggaaatcggaaaagaaaaggacaggcattgtagggaagcagaggataaagaatttagccaacaaaagaaacaatctagtcaatctgggtgcttttatttcctgggttctctctaaacatggctcagagctggtgtagatgaagtaggtgaaacctctgaaaagagtctagaaggcagtagagcaagtcccagaccagaaacatgctcatcttttcatcgtaatgtgccactcggtactatttggtaatgtcactctatttttcctaatcccatcctttggtttgtatttcatatttgtatataaggcaccattttctaaaaatatgactagggtgtgacctaaggttttattctgtgaagatgagtaactggaaagaagctaacactgcagtgggaaggaaggaagagagttgtccaggtggtagttcgacgtgttttgaatctagtccttcctacatggaggataaaagctcctaaagtccactctgggtttgtgattttaatagaaatagaaagggaaactatagaccaatggagatgaaaatcaggggctatcgacagatggaggagaaataaggtgctacatagagaaaggaagagggcagaaggctttcccttcccaaactgggtgagctggggaagccttggttcaggagagtggcactgcccacaactgctttgtgggttgtgcacttccagccgcactctccccctccagttgctgccttcagagccgtactgaagcacgagcttcaataagacaagcacacttcatagtgagagggcagcggtaccaaagcctttcagagagactatggattagacagaaatgatttgtgagaggaagctggagtgaacagcatgaacagcgagtgttacctgacagaggcaagacagctagaagtggcttcagatttagaaacagctgaggggagcaaagacggactgtgtacacagggagggaggatgtctatgggcagagcccttggtgagtatcatcaccaagaaaggcagtccagagtagagatcagccgaatatggaggctgaggtctgtagaactgggccagagaggaccttactgccttagtagcataagggtctggaaaagaagtttctatctcacaacaaaggaaaaagtgaaaagcaaggtggaacttgaagatacgtcacgaaaatcactataaaagtctgatttatgtgtgatgtcaaatcaaactgaaatgaagaatgagattgagtatatctgtggtgactgacctctgtatactagaaacctcaacatctctagaagaggaaataaaagctgctttgcactctg

SEQ ID NO: 1028 - protein, 709 aa, Homo Sapiens
MGKARRSPPGHHRHCEGCFNRHCHIPVEPNTSCLVISCHLLCGATFHMCKEAEHQLLCPLEQVPCLNSEYGCPLSMSRHKLAKHLQVCPASVVCCSMEWNRWPNVDSETTLHENIMKETPSEECLDTALALQDQKVLFRSLKMVELFPETREATEEEPTMNGETSVEEMGGAVGGVDIGLVPHGLSATNGEMAELSQEEREVLAKTKEGMDLVKFGQWENIFSKEHAASALTNSSASCESKNKNDSEKEQISSGHNMVEGEGAPKKKEPQENQKQQDVRTAMETTGLAPWQDGVLERLKTAVDAKDYNMYLVHNGRMLIHFGQMPACTPKERDFVYGKLEAQEVKTVYTFKVPVSYCGKRARLGDAMLSCKPSEHKAVDTSDLGITVEDLPKSDLIKTTLQCALERELKGHVISESRSIDGLFMDFATQTYNFEPEQFSSGTVLADLTAATPGGLHVELHSECVTRRHNKSSSAFTFTCNKFFRRDEFPLHFKNVHTDIQSCLNGWFQHRCPLAYLGCTFVQNHFRPPGQKAKVIYSQELKTFAIKPEVAPELSEGRKNNHLLGHGGKSQNSLTSLPLEILKYIAGFLDSVSLAQLSQVSVLMRNICATLLQERGMVLLQWKKKRYSHGGTSWRVHREIWQFSSLFSKIKSWEFNEVTSMSEHLKSCPFNIVEHKTDPILLTSMCQPREQARESLVSTFRIRPRGRYVS

SEQ ID NO: 1029 - DNA, 2429 bp, Homo Sapiens
ctcttttctaagcttgtctcttaaaacccactggacgttggcacagtgctgggatgactatggagacccaaatgtctcagaatgtatgtcccagaaacctgtggctgcttcaaccattgacagttttgctgctgctggcttctgcagacagtcaagctgcagctcccccaaaggctgtgctgaaacttgagcccccgtggatcaacgtgctccaggaggactctgtgactctgacatgccagggggctcgcagccctgagagcgactccattcagtggttccacaatgggaatctcattcccacccacacgcagcccagctacaggttcaaggccaacaacaatgacagcggggagtacacgtgccagactggccagaccagcctcagcgaccctgtgcatctgactgtgctttccgaatggctggtgctccagacccctcacctggagttccaggagggagaaaccatcatgctgaggtgccacagctggaaggacaagcctctggtcaaggtcacattcttccagaatggaaaatcccagaaattctcccatttggatcccaccttctccatcccacaagcaaaccacagtcacagtggtgattaccactgcacaggaaacataggctacacgctgttctcatccaagcctgtgaccatcactgtccaagtgcccagcatgggcagctcttcaccaatggggatcattgtggctgtggtcattgcgactgctgtagcagccattgttgctgctgtagtggccttgatctactgcaggaaaaagcggatttcagccaattccactgatcctgtgaaggctgcccaatttgagccacctggacgtcaaatgattgccatcagaaagagacaacttgaagaaaccaacaatgactatgaaacagctgacggcggctacatgactctgaaccccagggcacctactgacgatgataaaaacatctacctgactcttcctcccaacgaccatgtcaacagtaataactaaagagtaacgttatgccatgtggtcatactctcagcttgctgagtggatgacaaaaagaggggaattgttaaaggaaaatttaaatggagactggaaaaatcctgagcaaacaaaaccacctggcccttagaaatagctttaactttgcttaaactacaaacacaagcaaaacttcacggggtcatactacatacaagcataagcaaaacttaacttggatcatttctggtaaatgcttatgttagaaataagacaaccccagccaatcacaagcagcctactaacatataattaggtgactagggactttctaagaagatacctacccccaaaaaacaattatgtaattgaaaaccaaccgattgcctttattttgcttccacattttcccaataaatacttgcctgtgacattttgccactggaacactaaacttcatgaattgcgcctcagatttttcctttaacatcttttttttttttgacagagtctcaatctgttacccaggctggagtgcagtggtgctatcttggctcactgcaaacccgcctcccaggtttaagcgattctcatgcctcagcctcccagtagctgggattagaggcatgtgccatcatacccagctaatttttgtattttttattttttttttttagtagagacagggtttcgcaatgttggccaggccgatctcgaacttctggcctctagcgatctgcccgcctcggcctcccaaagtgctgggatgaccagcatcagccccaatgtccagcctctttaacatcttctttcctatgccctctctgtggatccctactgctggtttctgccttctccatgctgagaacaaaatcacctattcactgcttatgcagtcggaagctccagaagaacaaagagcccaattaccagaaccacattaagtctccattgttttgccttgggatttgagaagagaattagagaggtgaggatctggtatttcctggactaaattccccttggggaagacgaagggatgctgcagttccaaaagagaaggactcttccagagtcatctacctgagtcccaaagctccctgtcctgaaagccacagacaatatggtcccaaatgactgactgcaccttctgtgcctcagccgttcttgacatcaagaatcttctgttccacatccacacagccaatacaattagtcaaaccactgttattaacagatgtagcaacatgagaaacgcttatgttacaggttacatgagagcaatcatgtaagtctatatgacttcagaaatgttaaaatagactaacctctaacaacaaattaaaagtgattgtttcaaggtgatgcaattattgatgacctattttatttttctataatgatcatatattacctttgtaataaaacattataaccaaaaca

SEQ ID NO: 1030 - protein, 317 aa, Homo Sapiens
MTMETQMSQNVCPRNLWLLQPLTVLLLLASADSQAAAPPKAVLKLEPPWINVLQEDSVTLTCQGARSPESDSIQWFHNGNLIPTHTQPSYRFKANNNDSGEYTCQTGQTSLSDPVHLTVLSEWLVLQTPHLEFQEGETIMLRCHSWKDKPLVKVTFFQNGKSQKFSHLDPTFSIPQANHSHSGDYHCTGNIGYTLFSSKPVTITVQVPSMGSSSPMGIIVAVVIATAVAAIVAAVVALIYCRKKRISANSTDPVKAAQFEPPGRQMIAIRKRQLEETNNDYETADGGYMTLNPRAPTDDDKNIYLTLPPNDHVNSNN

SEQ ID NO: 1031 - DNA, 2174 bp, Homo Sapiens
agaacatttctttttcacttcccctttcagactccagaatttgtttgccctctagggtagaatccgccaagctttgagagaaggctgtgactgctgtgctctgggcgccagctcgctccagggagtgatgggaatcctgtcattcttacctgtccttgccactgagagtgactgggctgactgcaagtccccccagccttggggtcatatgcttctgtggacagctgtgctattcctggctcctgttgctgggacacctgcagctcccccaaaggctgtgctgaaactcgagccccagtggatcaacgtgctccaggaggactctgtgactctgacatgccgggggactcacagccctgagagcgactccattcagtggttccacaatgggaatctcattcccacccacacgcagcccagctacaggttcaaggccaacaacaatgacagcggggagtacacgtgccagactggccagaccagcctcagcgaccctgtgcatctgactgtgctttctgagtggctggtgctccagacccctcacctggagttccaggagggagaaaccatcgtgctgaggtgccacagctggaaggacaagcctctggtcaaggtcacattcttccagaatggaaaatccaagaaattttcccgttcggatcccaacttctccatcccacaagcaaaccacagtcacagtggtgattaccactgcacaggaaacataggctacacgctgtactcatccaagcctgtgaccatcactgtccaagctcccagctcttcaccgatggggatcattgtggctgtggtcactgggattgctgtagcggccattgttgctgctgtagtggccttgatctactgcaggaaaaagcggatttcagctctcccaggataccctgagtgcagggaaatgggagagaccctccctgagaaaccagccaatcccactaatcctgatgaggctgacaaagttggggctgagaacacaatcacctattcacttctcatgcacccggatgctctggaagagcctgatgaccagaaccgtatttagtctccattgtcttgcattgggatttgagaagaaaatcagagagggaagatctggtatttcctggcctaaattccccttggggaggacagggagatgctgcagttccaaaagagaaggtttcttccagagtcatctacctgagtcctgaagctccctgtcctgaaagccacagacaatatggtcccaaataaccgactgcaccttctgtgcttcagctcttcttgacatcaaggctcttccgttccacatccacacagccaatccaattaatcaaaccactgttattaacagataatagcaacttgggaaatgcttatgttacaggttacgtgagaacaatcatgtaaatctatatgatttcagaaatgttaaaatagactaacctctaccagcacattaaaagtgattgtttctgggtgataaaattattgatgatttttattttctttatttttctataaagatcatatattacttttataataaaacattataaaaacaacattctgtttaccttttcaaggctgtattggttggagtgtagactgaactgcctggggtctgtttctcttcagtgatgagactcttaggaaggcaggaatggataggatagggggaggagaggagagatggggatttagaatgtagagtgagtgccccttttcttaaaactgaatacagtcacgcaccacataatgatgtttagttcaacaacagactgcatatatgatggtgatcccataaaattataataccatatttctattgtaccttttctattcctatgtttagatatatgagtacttaccattgtgttacaattgcctaaagtattcagtacagtagcatgctgtacaggtttgtagcctaggggcaataggctatacgctacagcctaggtgtgtagtaggccacaccatttaggtttgtataagtacctgctatgatgttcacacaacaaaattgcctgcatttctcaaaatgtatccccatatttcaacaatgcatgactgtactcttctgccaatgaccttgtattcttgtttccatgtcttcttctctttcctcctatggcaaataaaacactgttttgcaacacaaaaaaaaaaaaaaa

SEQ ID NO: 1032 - protein, 310 aa, Homo Sapiens
MGILSFLPVLATESDWADCKSPQPWGHMLLWTAVLFLAPVAGTPAAPPKAVLKLEPQWINVLQEDSVTLTCRGTHSPESDSIQWFHNGNLIPTHTQPSYRFKANNNDSGEYTCQTGQTSLSDPVHLTVLSEWLVLQTPHLEFQEGETIVLRCHSWKDKPLVKVTFFQNGKSKKFSRSDPNFSIPQANHSHSGDYHCTGNIGYTLYSSKPVTITVQAPSSSPMGIIVAVVTGIAVAAIVAAVVALIYCRKKRISALPGYPECREMGETLPEKPANPTNPDEADKVGAENTITYSLLMHPDALEEPDDQNRI

SEQ ID NO: 1033 - DNA, 1510 bp, Homo Sapiens
agactccagaatttgtttgccctctagggtagaatccgccaagctttgagagaaggctgtgactgctgtgctctgggcgccagctcgctccagggagtgatgggaatcctgtcattcttacctgtccttgccactgagagtgactgggctgactgcaagtccccccagccttggggtcatatgcttctgtggacagctgtgctattcctggctcctgttgctgggacacctgcagctcccccaaaggctgtgctgaaactcgagccccagtggatcaacgtgctccaagaggactctgtgactctgacatgccgggggactcacagccctgagagcgactccattccgtggttccacaatgggaatctcattcccacccacacgcagcccagctacaggttcaaggccaacaacaatgacagcggggagtacacgtgccagactggccagaccagcctcagcgaccctgtgcatctgactgtgctttctgagtggctggtgctccagacccctcacctggagttccaggagggagaaaccatcgtgctgaggtgccacagctggaaggacaagcctctggtcaaggtcacattcttccagaatggaaaatccaagaaattttcccgttcggatcccaacttctccatcccacaagcaaaccacagtcacagtggtgattaccactgcacaggaaacataggctacacgctgtactcatccaagcctgtgaccatcactgtccaagctcccagctcttcaccgatggggatcattgtggctgtggtcactgggattgctgtagcggccattgttgctgctgtagtggccttgatctactgcaggaaaaagcggatttcagccaattccactgatcctgtgaaggctgcccaatttgagccacctggacgtcaaatgattgccatcagaaagagacaacctgaagaaaccaacaatgactatgaaacagctgacggcggctacatgactctgaaccccagggcacctactgacgatgataaaaacatctacctgactcttcctcccaacgaccatgtcaacagtaataactaaagagtaacgttatgccatgtggtcacactctcagcttgctgagtggatgacaaaaagaggggaattgttaaaggaaaatttaaatggagactggaaaaattcctgagcaaacaaaaccacctggcccttagaaatagctttaactttgcttaaactacaaacacaagcaaaacttcacggggtcatactacatacaagcataagcaaaacttaacttggatgatttctggtaaatgcttatgttagaaataagacaaccccagccaatcacaagcagcctactaacatataattaggtgactagggactttctaagaagatacctacccccaaaaaacaattatgtaattgaaaacccatcgattgcctttattttgcttccacattttcccaataaatacttgcctgtgacattttgccactggaacactaaacttca

SEQ ID NO: 1034 - protein, 323 aa, Homo Sapiens
MGILSFLPVLATESDWADCKSPQPWGHMLLWTAVLFLAPVAGTPAAPPKAVLKLEPQWINVLQEDSVTLTCRGTHSPESDSIPWFHNGNLIPTHTQPSYRFKANNNDSGEYTCQTGQTSLSDPVHLTVLSEWLVLQTPHLEFQEGETIVLRCHSWKDKPLVKVTFFQNGKSKKFSRSDPNFSIPQANHSHSGDYHCTGNIGYTLYSSKPVTITVQAPSSSPMGIIVAVVTGIAVAAIVAAVVALIYCRKKRISANSTDPVKAAQFEPPGRQMIAIRKRQPEETNNDYETADGGYMTLNPRAPTDDDKNIYLTLPPNDHVNSNN

SEQ ID NO: 1035 - DNA, 4260 bp, Homo Sapiens
atggaaggcactcattgtaccctccaattgcataagcccattacggaactctgctacatcagcttctgtcttccaaagggggaagtcagaggattttcatacaagggcactgtaactctagacagatccaataaaggttttcataactgctaccaagtcagggaggagtcagacatcatcagcctcagccaggagccggacgaacatccaggcgacatatttttcaagcagactcccacgaaagacattctaactgagctgtacaaactcacaacagagagggagagactgctaaccaatctcctgagctcagaccacatcctggggatcacgatggggaaccaggaggggaagctgcaagagctgtccgtgagcctggcccccgaggatgactgtttccagagtgctggtgactggcagggagagctccccgtgggccctctcaataagaggagcacccacgggaacaaaaagcctcggaggtctagtggaaggagagagagctttggggcccttccacagaagaggaccaaaagaaaagggcgtggaggccgagaatcagctcctctgatgggcaaggacaagatctgttccagccactcccttcctctttctagaacaaggcctaacctttgggtactagaggagaaaggaaatctgctcccgaatggggcacttgcctgctccctgcagaggagagagagctgccccccagatattcccaagacgccagacacagaccttggctttgggagctttgagacggctttcaaggacactgggcttggaagagaagtgctgccccctgactgcagctccacagaggcaggaggggatggcattcggaggccgccgagcgggctggagcatcagcaaacaggtttgtctgaaagtcaccaggaccctgagaagcatccagaggcagaaaaggatgagatggagaagccggctaagcggacttgcaagcagaaacctgtctccaaagtggtggccaaagttcaggacctgtcctcccaggtacaaagagtagttaaaacgcattctaagggtaaggagacgattgccattcgcccagcagcccacgctgagtttgtacccaaagccgacttgctcaccctcccgggagctgaggctggggctcatggctccaggcggcagggcaaggagcggcaaggggataggtcatcgcagtcgccagccggggaaacagcctccatttctagtgtgtcggccagtgccgagggggccgtgaacaaggtccccctgaaggtgatagagagtgagaagttagatgaagcccctgaggggaaaagactgggcttccctgtccacacgagtgtccctcacactcgcccagaaacgagaaacaagaggagagccgggttgccccttggtggccacaagtccttgtttctggatctgccccacaaagtaggtcctgactcctcacaacccagaggtgataagaagaagccatccccaccagcaccggcagctcttggcaaggtgtttaataattcagcctcgcagtccagcacacacaaacagacgtcacctgttccctcgcctctgtctccaaggctccccagccctcagcagcatcacaggatcctccggctccctgcattgcctggtgagagggaagctgctcttaatgactctccttgtagaaagagccgtgtcttctctgggtgcgtctctgctgacaccttggagccaccatcctctgcaaaggtcacggagaccaaaggagccagcccggccttcctcagagcaggccaacctcggttggtgcctggggaaactttggaaaagagcttggggccagggaagaccacagctgagccccagcaccagtcacctccaggtatctcctctgagggctttccctgggacggcttcaatgagcagacacctaaagaccttcccaacagagatggaggcgcgtgggttctgggctacagagcgggaccagcctgtccatttttgcttcatgaggaaagggagaagtcaaacaggagcgaattgtacttggatctccatcctgaccacagcctgactgagcaggatgacaggactcctggcagacttcaagctgtctggccacccccaaagacaaaagacacagaagaaaaagtgggactgaagtacactgaagcagaataccaagctgctattttacacttgaagagggagcacaaagaagaaattgaaaacctgcaggcacagtttgaacttcgggcatttcatatccggggcgagcatgcaatgataacagcgagactagaagaaaccattgaaaatctgaaacacgagctagaacacagatggcgagggggttgtgaagagaggaaagatgtgtgcatttccaccgatgatgactgccctccaaagaccttcagaaatgtgtgcgtccagacagacagagagaccttcctcaagccctgtgaaagtgaaagcaagacaaccagaagtaatcaattagtacccaaaaagctgaatatctcctctttaagccagctctcacccccaaatgaccacaaagacatccatgcagcactccagccaatggagggcatggcatcaaatcagcagaaggcattgcctccgcctcccgcatccatccctccccctccgcccctcccctcaggacttggatctttgtctcccgcacctccaatgccacctgtgagtgctgggccaccgctaccacctccgcctcctccaccgccacctctacctccaccttcaagtgctggacctccaccacccccacccccacccccacttcctaactcccctgccccacccaaccctggagggcctcctcctgctccaccacccccaggacttgcacccccacctccccctggactcttctttggacttggctcttcttccagtcaatgtcctcgaaaaccagccatcgagcccagttgtcccatgaagcctttatattggactaggatacaaataagtgataggagccaaaatgctacaccaaccttatgggactccttagaagaacctgacattcgggaccccagtgaatttgagtatttattctccaaagacacaactcaacagaagaaaaaacctctgtcagagacttatgagaagaaaaacaaggtcaaaaagatcatcaaattgttggatggaaaacgatctcaaactgtgggaatcttgatatctagtttacatttagaaatgaaggatatccaacaggccattttcaatgtggatgactccgtggttgatctggagaccctggcagccttatatgaaaacagagcccaagaggatgagctggttaaaataagaaagtattacgagacatccaaagaagaagaactgaagctgctggataaacctgagcaatttttacatgagttagcccagattcctaattttgctgaacgtgcccagtgcataatcttcagatctgtcttttctgagggtatcacctccttgcacagaaaggtagagatcatcacgcgagcttctaaggacttgctgcacgtgaagagcgtgaaggatattttagctctcatcttggcttttggaaattatatgaatggaggaaataggactcggggacaagccgatggatatagcttagaaattctgcccaaactcaaggatgtcaaaagtcgggataatgggattaatctggtggactacgttgttaagtattacctgcgttactatgatcaggaagctggaacagaaaagagtgttttccccttgccggaaccacaggatttctttctggcctcccaagtcaagtttgaagacctcataaaagatttgagaaaactgaagaggcaactagaagcaagtgagaaacagatggtggtggtgtgcaaggagtccccaaaggagtatctccagcctttcaaggacaaactagaggagttcttccaaaaagccaaaaaagagcataagatggaagaaagtcacttggagaatgcacagaaaagttttgaaacaacagtacgatattttgggatgaagccaaagtctggtgagaaggagatcacacccagctacgtgtttatggtgtggtatgagttctgcagtgacttcaagacaatttggaaacgggagagtaaaaacatatctaaagaaagattgaaaatggctcaggaatcagtcagcaagttgacttcagagaagaaagtggagacaaagaaaatcaatcccactgctagcctgaaagaaagactgcgtcagaaggaagccagtgtgaccactaactaa

SEQ ID NO: 1036 - protein, 1419 aa, Homo Sapiens
MEGTHCTLQLHKPITELCYISFCLPKGEVRGFSYKGTVTLDRSNKGFHNCYQVREESDIISLSQEPDEHPGDIFFKQTPTKDILTELYKLTTERERLLTNLLSSDHILGITMGNQEGKLQELSVSLAPEDDCFQSAGDWQGELPVGPLNKRSTHGNKKPRRSSGRRESFGALPQKRTKRKGRGGRESAPLMGKDKICSSHSLPLSRTRPNLWVLEEKGNLLPNGALACSLQRRESCPPDIPKTPDTDLGFGSFETAFKDTGLGREVLPPDCSSTEAGGDGIRRPPSGLEHQQTGLSESHQDPEKHPEAEKDEMEKPAKRTCKQKPVSKVVAKVQDLSSQVQRVVKTHSKGKETIAIRPAAHAEFVPKADLLTLPGAEAGAHGSRRQGKERQGDRSSQSPAGETASISSVSASAEGAVNKVPLKVIESEKLDEAPEGKRLGFPVHTSVPHTRPETRNKRRAGLPLGGHKSLFLDLPHKVGPDSSQPRGDKKKPSPPAPAALGKVFNNSASQSSTHKQTSPVPSPLSPRLPSPQQHHRILRLPALPGEREAALNDSPCRKSRVFSGCVSADTLEPPSSAKVTETKGASPAFLRAGQPRLVPGETLEKSLGPGKTTAEPQHQSPPGISSEGFPWDGFNEQTPKDLPNRDGGAWVLGYRAGPACPFLLHEEREKSNRSELYLDLHPDHSLTEQDDRTPGRLQAVWPPPKTKDTEEKVGLKYTEAEYQAAILHLKREHKEEIENLQAQFELRAFHIRGEHAMITARLEETIENLKHELEHRWRGGCEERKDVCISTDDDCPPKTFRNVCVQTDRETFLKPCESESKTTRSNQLVPKKLNISSLSQLSPPNDHKDIHAALQPMEGMASNQQKALPPPPASIPPPPPLPSGLGSLSPAPPMPPVSAGPPLPPPPPPPPPLPPPSSAGPPPPPPPPPLPNSPAPPNPGGPPPAPPPPGLAPPPPPGLFFGLGSSSSQCPRKPAIEPSCPMKPLYWTRIQISDRSQNATPTLWDSLEEPDIRDPSEFEYLFSKDTTQQKKKPLSETYEKKNKVKKIIKLLDGKRSQTVGILISSLHLEMKDIQQAIFNVDDSVVDLETLAALYENRAQEDELVKIRKYYETSKEEELKLLDKPEQFLHELAQIPNFAERAQCIIFRSVFSEGITSLHRKVEIITRASKDLLHVKSVKDILALILAFGNYMNGGNRTRGQADGYSLEILPKLKDVKSRDNGINLVDYVVKYYLRYYDQEAGTEKSVFPLPEPQDFFLASQVKFEDLIKDLRKLKRQLEASEKQMVVVCKESPKEYLQPFKDKLEEFFQKAKKEHKMEESHLENAQKSFETTVRYFGMKPKSGEKEITPSYVFMVWYEFCSDFKTIWKRESKNISKERLKMAQESVSKLTSEKKVETKKINPTASLKERLRQKEASVTTN

SEQ ID NO: 1037 - DNA, 2134 bp, Homo Sapiens
acccaagccagcactggctcatactgattcattttgatctctgctaataccagagtcctgcgtggcagagccattggcaccagaaattacaagagaacatggccaagcgagttgccattgtgggagctggggtcagcggcctggcctccatcaagtgctgtctggaagaaggactggagcccacctgctttgagaggagcgatgaccttggggggctgtggagattcaccgaacatgttgaagaaggcagagccagtctctacaagtctgtggtttccaacagctgcaaggagatgtcttgttactcagactttccattcccagaagattatccaaactatgtgccaaattctcaattcctggaatatctcaaaatgtatgcaaaccactttgaccttctgaaacacattcaattcaagaccaaagtctgcagtgtaacaaaatgctcagattctgctgtctctggccaatgggaggtggtcactatgcatgaagagaagcaagagtcagccatctttgatgctgtcatggtctgcactggctttcttactaatccttatttgccactggattcctttccaggtattaatgcctttaaaggccagtactttcatagccggcaatataagcatccagatatatttaaggacaagagagtccttgtgattggaatgggaaattctggcacagacattgctgtggaggccagccacctggcggaaaaggtgttcctcagcaccaccggagggggatgggtgatcagccgaatctttgactcgggctacccatgggacatggtgttcatgacacgctttcagaacatgttgagaaattccctcccaaccccaattgtgacttggttgatggagcgaaagataaacaactggctcaatcatgcaaattacggcttaataccagaagacaggactcagctgaaagagtttgtgctaaatgatgagctcccaggacgcatcatcactgggaaagtgttcatcaggccaagcataaaagaggtaaaggaaaactctgtcatatttaacaatacttcaaaggaagagcctattgacatcattgtctttgccactggatacacatttgctttccccttccttgatgagtctgtagtgaaagttgaagatggccaggcctcactgtacaagtatatcttccctgcacatctgcaaaagccaaccctggccattattggcctcatcaaacccttgggctccatgatacctacaggagaaacacaagctcggtgggctgttcgagtcctgaaaggtgtaaataagttaccaccaccaagtgtcatgatagaggaaattaatgcaaggaaagaaaacaagcccagttggtttggcttgtgctactgcaaggctttacaatcagattatatcacatacatagatgaactcctgacctatatcaatgcaaaacccaacctgttctctatgctcctaacggatccacatctggctctgaccgtcttctttggcccatgctcaccataccagttccgcttgactggcccaggaaaatgggaaggagccagaaatgccatcatgacccagtgggaccgaacattcaaggtcatcaaagctcgagttgtacaagagtctccatctccctttgaaagttttcttaaagtctttagctttctggctttgcttgtggctatttttctgattttcctataagtaaaagatctcctaaatggaagatgcacagagtagatttacaatgctccaattcctctcttacagcaatattgccttcacagttataaactgtattcaaatagtaaaggccaccctctcgcttccctggctggccccagggctaccactggtattcctgagcctctcccagctccacttctaatgctagagaatgataactaagacttctgtgcatttgaaggttgttggaaagttacaggttcattttagaaagaaagctgttcttgacagcactctgagccatcatacctctttcccatataaactattttcacagatctcaactaaaaccccttacttcacaaatgattgtgttgtgctgaaatggtgctcttatagtactggcttattaaaagtaaaaaataaacctaaaaattgattgttttaaaaaaaaa

SEQ ID NO: 1038 - protein, 532 aa, Homo Sapiens
MAKRVAIVGAGVSGLASIKCCLEEGLEPTCFERSDDLGGLWRFTEHVEEGRASLYKSVVSNSCKEMSCYSDFPFPEDYPNYVPNSQFLEYLKMYANHFDLLKHIQFKTKVCSVTKCSDSAVSGQWEVVTMHEEKQESAIFDAVMVCTGFLTNPYLPLDSFPGINAFKGQYFHSRQYKHPDIFKDKRVLVIGMGNSGTDIAVEASHLAEKVFLSTTGGGWVISRIFDSGYPWDMVFMTRFQNMLRNSLPTPIVTWLMERKINNWLNHANYGLIPEDRTQLKEFVLNDELPGRIITGKVFIRPSIKEVKENSVIFNNTSKEEPIDIIVFATGYTFAFPFLDESVVKVEDGQASLYKYIFPAHLQKPTLAIIGLIKPLGSMIPTGETQARWAVRVLKGVNKLPPPSVMIEEINARKENKPSWFGLCYCKALQSDYITYIDELLTYINAKPNLFSMLLTDPHLALTVFFGPCSPYQFRLTGPGKWEGARNAIMTQWDRTFKVIKARVVQESPSPFESFLKVFSFLALLVAIFLIFL

SEQ ID NO: 1039 - DNA, 1992 bp, Homo Sapiens
agcaaatactcactaccacaaataagaacatttccaaatctgatgttctgaggatttttagagcttatagtagcaaaaagaaaagggaaattctctctgagatgtccttttttgtaggcctaatgacaaaaggttgaagataaagttctagtactcatttaagtgtaatattgaaaattgatattaccaaatctggaacaaccaatttaaaataaggaaagaaagacactgtgttttctaggttaaaaatgcccagctggcaggggccaaaggagtcattctctactcagaccctgctgactactttgctcctggggtgaagtcctatccagacggttggaatcttcctggaggtggtgtccagcgtggaaatatcctaaatctgaatggtgcaggagaccctctcacaccaggttacccagcaaatgaatacgcttataggcatggaattgcagaggctgttggtcttccaagtattcctgttcatccagttggatactatgatgcacagaagctcctagaaaaaatgggtggctcagcaccaccagatagcagctggagaggaagtctcaaagtgtcctacaatgttggacctggctttactggaaacttttctacacaaaaagtcaagatgcacatccactctaccaatgaagtgacgagaatttacaatgtgataggtactctcagaggagcagtggaaccagacagatatgtcattctgggaggtcaccgggactcatgggtgtttggtggtattgaccctcagagtggagcagctgttgttcatgaaactgtgaggagctttggaacactgaaaaaggaagggtggagacctagaagaacaattttgtttgcaagctgggatgcagaagaatttggtcttcttggttctactgagtgggcagaggataattcaagactccttcaagagcgtggcgtggcttatattaatgctgactcatctatagaaggaaactacactctgagagttgattgtacaccactgatgtacagcttggtatacaacctaacaaaagagctgaaaagccctgatgaaggctttgaaggcaaatctctttatgaaagttggactaaaaaaagtccttccccagagttcagtggcatgcccaggataagcaaattgggatctggaaatgattttgaggtgttcttccaacgacttggaattgcttcaggcagagcacggtatactaaaaattgggaaacaaacaaattcagcggctatccactgtatcacagtgtctatgaaacatatgagttggtggaaaagttttatgatccaatgtttaaatatcacctcactgtggcccaggttcgaggagggatggtgtttgagctagccaattccatagtgctcccttttgattgtcgagattatgctgtagttttaagaaagtatgctgacaaaatctacaatatttctatgaaacatccacaggaaatgaagacatacagtttatcatttgattcacttttttctgcagtaaaaaattttacagaaattgcttccaagttcagcgagagactccaggactttgacaaaagcaacccaatattgttaagaatgatgaatgatcaactcatgtttctggaaagagcatttattgatccattagggttaccagacagacctttttataggcatgtcatctatgctccaagcagccacaacaagtatgcaggggagtcattcccaggaatttatgatgctctgtttgatattgaaagcaaagtggacccttccaaggcctggggagatgtgaagagacagatttctgttgcagccttcacagtgcaggcagctgcagagactttgagtgaagtagcctaagaggattctttagagactctgtattgaatttgtgtggtatgtcactcaaagaataataatgggtatattgataaattttaaaattggtatatttgaaataaagttgaatattatatataaaaaaaaaaaaaaaaaaa

SEQ ID NO: 1040 - protein, 442 aa, Homo Sapiens
MGGSAPPDSSWRGSLKVSYNVGPGFTGNFSTQKVKMHIHSTNEVTRIYNVIGTLRGAVEPDRYVILGGHRDSWVFGGIDPQSGAAVVHETVRSFGTLKKEGWRPRRTILFASWDAEEFGLLGSTEWAEDNSRLLQERGVAYINADSSIEGNYTLRVDCTPLMYSLVYNLTKELKSPDEGFEGKSLYESWTKKSPSPEFSGMPRISKLGSGNDFEVFFQRLGIASGRARYTKNWETNKFSGYPLYHSVYETYELVEKFYDPMFKYHLTVAQVRGGMVFELANSIVLPFDCRDYAVVLRKYADKIYNISMKHPQEMKTYSLSFDSLFSAVKNFTEIASKFSERLQDFDKSNPILLRMMNDQLMFLERAFIDPLGLPDRPFYRHVIYAPSSHNKYAGESFPGIYDALFDIESKVDPSKAWGDVKRQISVAAFTVQAAAETLSEVA

SEQ ID NO: 1041 - DNA, 1992 bp, Homo Sapiens; identical to SEQ ID NO: 1039

SEQ ID NO: 1042 - protein, 442 aa, Homo Sapiens; identical to SEQ ID NO: 1040

SEQ ID NO: 1043 - DNA, 3628 bp, Homo Sapiens
agagcatcagcaagagtagcagcgagcagccgcgctggtggcggcggcgcgtcgttgcagttgcgccatctgtcaggagcggagccggcgaggagggggctgccgcgggcgaggaggaggggtcgccgcgagccgaaggccttcgagacccgcccgccgcccggcggcgagagtagaggcgaggttgttgtgcgagcggcgcgtcctctcccgcccgggcgcgccgcgcttctcccagcgcaccgaggaccgcccgggcgcacacaaagccgccgcccgcgccgcaccgcccggcggccgccgcccgcgccagggagggattcggccgccgggccggggacaccccggcgccgccccctcggtgctctcggaaggcccaccggctcccgggcccgccggggaccccccggagccgcctcggccgcgccggaggagggcggggagaggaccatgtgagtgggctccggagcctcagcgccgcgcagtttttttgaagaagcaggatgctgatctaaacgtggaaaaagaccagtcctgcctctgttgtagaagacatgtggtgtatataaagtttgtgatcgttggcggacattttggaatttagataatgggctgtgtgcaatgtaaggataaagaagcaacaaaactgacggaggagagggacggcagcctgaaccagagctctgggtaccgctatggcacagaccccacccctcagcactaccccagcttcggtgtgacctccatccccaactacaacaacttccacgcagccgggggccaaggactcaccgtctttggaggtgtgaactcttcgtctcatacggggaccttgcgtacgagaggaggaacaggagtgacactctttgtggccctttatgactatgaagcacggacagaagatgacctgagttttcacaaaggagaaaaatttcaaatattgaacagctcggaaggagattggtgggaagcccgctccttgacaactggagagacaggttacattcccagcaattatgtggctccagttgactctatccaggcagaagagtggtactttggaaaacttggccgaaaagatgctgagcgacagctattgtcctttggaaacccaagaggtacctttcttatccgcgagagtgaaaccaccaaaggtgcctattcactttctatccgtgattgggatgatatgaaaggagaccatgtcaaacattataaaattcgcaaacttgacaatggtggatactacattaccacccgggcccagtttgaaacacttcagcagcttgtacaacattactcagagagagctgcaggtctctgctgccgcctagtagttccctgtcacaaagggatgccaaggcttaccgatctgtctgtcaaaaccaaagatgtctgggaaatccctcgagaatccctgcagttgatcaagagactgggaaatgggcagtttggggaagtatggatgggtacctggaatggaaacacaaaagtagccataaagactcttaaaccaggcacaatgtcccccgaatcattccttgaggaagcgcagatcatgaagaagctgaagcacgacaagctggtccagctctatgcagtggtgtctgaggagcccatctacatcgtcaccgagtatatgaacaaaggaagtttactggatttcttaaaagatggagaaggaagagctctgaaattaccaaatcttgtggacatggcagcacaggtggctgcaggaatggcttacatcgagcgcatgaattatatccatagagatctgcgatcagcaaacattctagtggggaatggactcatatgcaagattgctgacttcggattggcccgattgatagaagacaatgagtacacagcaagacaaggtgcaaagttccccatcaagtggacggcccccgaggcagccctgtacgggaggttcacaatcaagtctgacgtgtggtcttttggaatcttactcacagagctggtcaccaaaggaagagtgccatacccaggcatgaacaaccgggaggtgctggagcaggtggagcgaggctacaggatgccctgcccgcaggactgccccatctctctgcatgagctcatgatccactgctggaaaaaggaccctgaagaacgccccacttttgagtacttgcagagcttcctggaagactactttaccgcgacagagccccagtaccaacctggtgaaaacctgtaaggcccgggtctgcggagagaggccttgtcccagaggctgccccacccctccccattagctttcaattccgtagccagctgctccccagcagcggaaccgcccaggatcagattgcatgtgactctgaagctgacgaacttccatggccctcattaatgacacttgtccccaaatccgaacctcctctgtgaagcattcgagacagaaccttgttatttctcagactttggaaaatgcattgtatcgatgttatgtaaaaggccaaacctctgttcagtgtaaatagttactccagtgccaacaatcctagtgctttccttttttaaaaatgcaaatcctatgtgattttaactctgtcttcacctgattcaactaaaaaaaaaaaagtattattttccaaaagtggcctctttgtctaaaacaataaaattttttttcatgttttaacaaaaaccaatcaggacaggtgtttgtttttgttttcttttttataaatatgaatatatataatatatatgtccctgtacatatacaatgtgggtgctaatgtggagactgtggccggcctgagccaccaagctgcgggacccagagggaggattttactgcaagtcagcatcaaagcaccggtgttattctgaaaacaccagtggcctcatttttggcttttgcaaagcatgaattttttcatttggattgcactttcctggttcatgactgtacctgtaggtggttgttactttgactcttttcaggaaccaccccccaagctgaatttacaagttctgttagcactatttgcttcaacttactgcgatttgttctcaaaacttaaaaataagcaagcaaatggctgatactaccaagagaactggaagatggataccacacaaacttcttgtataaaaatatgaatgctgaaatgtttcagacatttttaatttaataaacctgtaaccacatttaagtgatctaaaacccatagcattgtagtcatggcaacccgctaaactttctcatgcaactaaaatttctgggggaaatgagggtgggggttgtacatttcccattgtaaaataagtgttttaaatgtcctgtactgctaacgaatgactttctatatgtccaggagttctccagtggaataactatgcactactttacatttcatggggatgcacaaaaacaaaaaagtattacatttttagttgctgtttgtaccaaccttaaattacatatgtttaacaacaacaaatcaaaaatcctatttctattgagtttttaatactgactagcaactctgaagtcttaattccttttttgttatgatttatttgtgagtttacatttttaaattgtttaactttcttaatttagtaattaaaaagagagcattttacatttgaa

SEQ ID NO: 1044 - protein, 537 aa, Homo Sapiens
MGCVQCKDKEATKLTEERDGSLNQSSGYRYGTDPTPQHYPSFGVTSIPNYNNFHAAGGQGLTVFGGVNSSSHTGTLRTRGGTGVTLFVALYDYEARTEDDLSFHKGEKFQILNSSEGDWWEARSLTTGETGYIPSNYVAPVDSIQAEEWYFGKLGRKDAERQLLSFGNPRGTFLIRESETTKGAYSLSIRDWDDMKGDHVKHYKIRKLDNGGYYITTRAQFETLQQLVQHYSERAAGLCCRLVVPCHKGMPRLTDLSVKTKDVWEIPRESLQLIKRLGNGQFGEVWMGTWNGNTKVAIKTLKPGTMSPESFLEEAQIMKKLKHDKLVQLYAVVSEEPIYIVTEYMNKGSLLDFLKDGEGRALKLPNLVDMAAQVAAGMAYIERMNYIHRDLRSANILVGNGLICKIADFGLARLIEDNEYTARQGAKFPIKWTAPEAALYGRFTIKSDVWSFGILLTELVTKGRVPYPGMNNREVLEQVERGYRMPCPQDCPISLHELMIHCWKKDPEERPTFEYLQSFLEDYFTATEPQYQPGENL

SEQ ID NO: 1045 - DNA, 475 bp, Homo Sapiens
agagcagagacctgagaggcaccaggcccagccgtggcaccacacacctcccagctctgcagacgagatgcagcgactatgtgtgtatgtgctgatctttgcactggctctggccgccttctctgaagcttcttggaagccccgctcccagcagccagatgcacccttaggtacaggggccaacagggacctggagctaccctggctggagcagcagggcccagcctctcatcatcgaaggcagctgggaccccagggtcccccacacctcgtggcagacccgtccaagaagcagggaccatggctggaggaagaagaagaagcctatggatggatggacttcggccgccgcagtgctgaggatgagaactaacaatcctagaaccaagcttcagagcctagccacctcccaccccactccagccctgtcccctgaaaaactgatcaaaaataaactagtttccagtggaaaaaa

SEQ ID NO: 1046 - protein, 101 aa, Homo Sapiens
MQRLCVYVLIFALALAAFSEASWKPRSQQPDAPLGTGANRDLELPWLEQQGPASHHRRQLGPQGPPHLVADPSKKQGPWLEEEEEAYGWMDFGRRSAEDEN

SEQ ID NO: 1047 - DNA, 4430 bp, Homo Sapiens
agcttcctgatttctgaagtctgagtgatttcctccgtgtgccgagaggaaacagccttctgcactcacagccgaagggaaagcagcaggttggggcttcttgtggccaacttcagagcctgtcaccaggaaaggtaagcatgggaggaaggaagatggcgacagatgaagaaaatgtctatggtttagaagagaacgctcagtcccggcaggagtccacgcggaggctcatccttgttgggagaacaggggccgggaagagcgccactgggaacagcatcctgggccagagacggttcttctccaggctgggggccacgtctgtgaccagggcctgcaccacgggcagccgcaggtgggacaagtgccacgtggaagtcgtggacactccggacattttcagctcccaagtgtccaagacagatcctggctgtgaggagagaggtcactgctacctgctctcggcccccggaccccacgcgctgctcctggtgacccagttgggtcggttcaccgcccaggaccagcaggcggtgaggcaggtgagggacatgttcggggaggacgtcctaaaatggatggtcatcgtcttcaccaggaaggaggacctggccgggggctccctgcacgattacgtgagcaacacagagaaccgggccttgcgcgagctggtggccgagtgcgggggccgggtctgtgcctttgataaccgggccaccggccgggagcaggaagcccaggtggagcagctgctggggatggtcgagggcttggtgctggagcacaagggcgcccattactccaacgaggtgtatgagctggcgcaggtgctgcgctgggcaggccctgaggagcggctccggcgggtggcggagcgcgtggcagccagggtgcagaggaggccatggggcgcctggctgtcggcccggctgtggaagtggctgaagtcccccaggagctggaggctgggcctggccctgctgctggggggcgcgctcctgttctgggtgctgctccacaggcggtggtcggaggccgttgcggaggtcgggcctgactgacagcgcaggtcctaaaactgaaggcaacttggttaagggaggctgaattcttggagctgaagggaaaacttcattccaacggaaggaatcctgtagtttcaggcatagttttaatgacacagaaaactttgctgcatcacctttgcaactttgccaaagctcagagttcactttttaagtttttaactcattttaaatgatgtgtatgcagagttttaaaataaattcgtctaacaataacttcctttggtagttttggtagtctaatgtcaagtagcttgtagtggggacaaacgcatggcacagggaaaacaagtgccattattttcgagctttttaaaaaatttagactgcccctccttgataattttctagttcttatacatgggtagataggttcctttgtgatccttgtagacttttagcatcaataaaagaaatgtgggggttacacacgtgaatgttacttctgagacatcagtttatagtacaatgatttactaccaaaaagatgaatgtaactgtactgttacaaagtggaaaataacagtttccacttttctagaacatattatggttcatggcattccaaaatgaagtaagggccgggcgaggtggctcacgcctgtaatcccaacactttgggaggtcgaggcaggtggatcacctgaggtcaggagttcgagaccagcctgaccaacatggcgaaaccccatctctactaaaaatacaaaaattagccaggcgtgatagcactcgcctgtaatcccagccattcaggaggctgaggcgggagaatcacttgatgcagtgagccgagatcgtgccactgcactccaggctgggtgacaaagcaagaatctgtctcaaaaaaaaaaaaagaaaagaaaagaaaaagaaaaagagtaggatattgggaaaataacatataatatcttctatatggttattcatatttttatcacacacacacacacacacacacacacacacagtctgtatctcgagctcctctctggttatggagaagaggcagagcaccaggtgcataggctgagactgcagacacctgagcatcctatgctgtgaggcgaaagcatccggttttttcgggatgggcctgtccaggaaggttctcgaatgccacgtgattagaaaatttgccgctgactggttgtgcgaatcaaacaataggatttccttatttctatttctgagcataatgagaaccctttaagggaactcattgtctttaaatcagccagcctctagtgaggtcatggagacatgggaagcaggtattcacattagctctattcaagaggaagaggaggagggagtgtgcgcaggcgccctagggtcttccccagcacacgttgggaagaaggggtctgcaagcatgcgcacaattgccagctcaggctaaggactgcaggaggttccaggtgggttgcgggcttcgggcaggctatggtgaggggtcctgagggccttggtgaccgctgcagggagttggactttttgaagcgtggctcaagaaaaacccatgtttaattcctgcctttcgcttcctcagcagcctttctgggcccaggcaggggcctcgagccagggaaggatcctttgatgaccagaggggacagcagggagggcacagcgtggtcgtccacggtcacttgcgcacgagccagtgctgctgctggtgttagacaacaacttttatcaaagtggtttaatgtacagcagcaacaaagctgctttgtggagcagggctcccaataggcagtgtgcccagagtagcagctcggaagcagtactgcaatcacatttatacccactttcaactatatgcaaatttaggggtggattatgccaaaatttctagaaaaaaggtcgtaacttccaggtcgtgggattgttgctatggaaaggagccaaaacttccagctgttgccttagcaatggtaacctgacgtggcactggtgagtgtgttttatggagagactctttcacctcttccctttcagcttgtcttcagtgtggtctggagcccaatccccacctccagagtctagtcctgcctcctacctcagtaataaaaagtagtagtatatggttaattgtcaaatacatttgcaaagtgtaatcaaagatacattaccaatctgaatctcaaaatgtgctatcatctttgaatttgaataatgtattattaaagaagttacagttttcctttacattcaataacatttctttagtggttttctttttcagatactttgattatgatcttttttttttcatctttgtatccccgttatacaacccagtgcctggcatagaaagtgggatcaacaaatgtttggaaaatgaattgtaaagttgactttcctgtacctttttaatattagatttctagctaccagacttttgaccattttctaaattttctaccatagataacagaaaattctttcgcgcaagcatgtcattgtattaatgatattctcctgccctaaggaaatttacttcccttcaagcacagggtcccccaaattactgtatttccacccctttcagcttattttatccttttctcctgctacagaacagttggcattcaccattcccttcggtaaagtctttttttaggctgtggcttaaaggttgctttttcccccatagctcaaggttaggccttgtgacctcacttatgtaatttgagtgatttgatagcacaaatcaattttatacttaaattacagcataaaacagcactgcctcctgttggaaaaacttgcttgctaattttaaccagacacagtaaaaatactgtccaatacctcaaaaattgtgtaaatatatatccatttcaattgtcccccttcctctcctctccttttatctcttggaagataaaaatgtatgggtcctgtgctgataatgtttctgttcatatttctatgccctggtacctggatcagcttttgttctacacaaaaagacttgtatctggcttatttctgaaagctagtgttggccatgatgaacttttagagcaaaagatttcaggcagagtacattcttacatattcttacacaatcaatattcagttccagcccgcacagtagccctagcaaatgccagtgctccttccagagattcacctatggattcagtaccccagaagagaatttctgtaaattcttggggaagctatagctagactatggctcaacactcatttttcccccatgattcttaatctaacagtggcaatgttggcctcttcttaggcaactagattcggttcttgcttattctgccaataaaatactttattgagatgcttaaaaaaaaaaaaaaa

SEQ ID NO: 1048 - protein, 306 aa, Homo Sapiens
MGGRKMATDEENVYGLEENAQSRQESTRRLILVGRTGAGKSATGNSILGQRRFFSRLGATSVTRACTTGSRRWDKCHVEVVDTPDIFSSQVSKTDPGCEERGHCYLLSAPGPHALLLVTQLGRFTAQDQQAVRQVRDMFGEDVLKWMVIVFTRKEDLAGGSLHDYVSNTENRALRELVAECGGRVCAFDNRATGREQEAQVEQLLGMVEGLVLEHKGAHYSNEVYELAQVLRWAGPEERLRRVAERVAARVQRRPWGAWLSARLWKWLKSPRSWRLGLALLLGGALLFWVLLHRRWSEAVAEVGPD

SEQ ID NO: 1049 - DNA, 1895 bp, Homo Sapiens
atgacaggaagtgacccgttaaggaagcagcacatcgctgcattcggctggttttcagggtcttgttcccaatcagtttccagccaacaccagggtgtcctagtccgcagaggtgtgggggacacactccataatctctacttttctttttgtgcagctgagtcatggagctttcagccccagcacatggctcctccttaactgcgtctgctcaacctccctcagccctgtgaacagcatccccgcacacagacgcagagcaggactctctctgctgccacttcaccttcctgagagaggaccagcggccagagcctcagtgactgccaccctggaggacagggcacaacaaccgtttctggagagaatgggaggattccagaggggcaaatatggaactatggctgaaggtagatcagaagataacttgtctgcaacaccaccggcattgaggattatcctagtgggcaaaacaggctgcgggaaaagtgccacagggaacagcatccttggccagcccgtgtttgagtccaagctgagggcccagtcagtgaccaggacgtgccaggtgaaaacaggaacatggaacgggaggaaagtcctggtggttgacacgccctccatctttgagtcacaggccgatacccaagagctgtacaagaacatcggggactgctacctgctctctgccccggggccccacgtcctgcttctggtgatccagctggggcgtttcactgctcaggacacagtggccatcaggaaggtgaaagaggtctttgggacaggggccatgagacatgtggtcatcctcttcacccacaaagaggacttagggggccaggccctggatgactatgtagcaaacacggacaactgcagcctgaaagacctggtgcgggagtgtgagagaaggtactgtgccttcaacaactggggctctgtggaggagcagaggcagcagcaggcagagctcctggctgtgattgagaggctggggagggagcgagagggctccttccacagcaatgacctcttcttggatgcccagctgctccaaagaactggagctggggcctgccaggaagactacaggcagtaccaggccaaagtggaatggcaggtggagaagcacaagcaagagctgagggagaacgagagtaactgggcatacaaggcgctcctcagagtcaaacacttgatgcttttgcattatgagatttttgtttttctattgttgtgcagcatactttttttcattatttttctgttcatctttcattacatttaaatctctggaccctggagcacttctaatgtatcaccccatggagtcattgttctaataatcaccaattcagactcagatcctcgtggtctatggagcatgctgcttgctgtctgtgcagctcccatttccccttcttcctgatagacttggagctgtgtgcctccactccaaggctgcctgcctgctgtaaacactattccactctgtctgccaacaactgcttcaggaatgggcctgagatcccatgcaggtccctgagaagtgagtaaaagtccgcagaggtggggatggaagatctctccttagatagaacctgtcttcctccctggcattgtggggtctgggcgtgacactgggactctcagcagctttgtgctgccaacctgagattgaaggcagtgcctcagagcagcacagagagttggggccccctgagccctgagccaccagccctgcagcctgccctatctccgcatttccagttgtattagccaatagatttcctacttatttaagctatttgagctccgggtctcttctacctgcattctaaaacattcaaagtaataaaaatttctccacattcaaaaaaaaaaaaaaaaaa

SEQ ID NO: 1050 - protein, 307 aa, Homo Sapiens
MGGFQRGKYGTMAEGRSEDNLSATPPALRIILVGKTGCGKSATGNSILGQPVFESKLRAQSVTRTCQVKTGTWNGRKVLVVDTPSIFESQADTQELYKNIGDCYLLSAPGPHVLLLVIQLGRFTAQDTVAIRKVKEVFGTGAMRHVVILFTHKEDLGGQALDDYVANTDNCSLKDLVRECERRYCAFNNWGSVEEQRQQQAELLAVIERLGREREGSFHSNDLFLDAQLLQRTGAGACQEDYRQYQAKVEWQVEKHKQELRENESNWAYKALLRVKHLMLLHYEIFVFLLLCSILFFIIFLFIFHYI

SEQ ID NO: 1051 - DNA, 3952 bp, Homo Sapiens
gaggcgctcagcacccagggaaggcgcgtgtgtccccgatgctggctcctccctgagccccgacggctctcgaggttctgagcctgtggcctgcacagggaacttcctctccgactgcatttatgcctctgtggatgtgaaggctatttctagaaatctcttcctttgcagaaacacccgaaaccctcctgccaggaagaccagggcctgggaagagggtcgctctccggccattctcccctcaccctcctcaccttcctcacatcctgtgccctgggggaccagcagctgcttccacccagaacaagcgggagcctgtgtcaggaaagcatgtcagagcagagctgccagatgtccgaactgcggctcctcctcctgggaaaatgccgctcgggaaaaagtgccacaggaaatgccattctgggcaaacatgtgttcaagtccaagttcagtgatcagacagtgatcaaaatgtgccagagagagagttgggtcctgagagaaaggaaggttgtggtaattgacacccctgaccttttctcctcaatagcttgtgctgaagacaagcaacgcaacatccaacactgcttggagctctctgctcccagcctccatgctctgctcttggtaattgccatcggccatttcacaagggaggatgaggaaacagccaagggcatccaacaagtgtttggagctgaagccaggaggcacatcattattgtcttcactcggaaggatgatttgggggatgacttgctgcaagatttcattgaaaaaaacaaacctctcaagcagttggttcaagactatgagggccgatactgcattttcaacaacaagaccaatagtaaggatgagcagatcacccaggtgttggagctccttcgcaaggttgagtctttggtgaatacgaacggaggaccctatcatgtgaacttcaaaactgaaggcagcaggtttcaagattgtgtgaatgaagctgcatctcaagagggagacaagccacagggcccaagggaaaggcagctgcagtccacaggacccgagcagaatccggggacatcagaactgacagtcctccttgtggggaaacgcggtgctggaaaaagtgcagcaggaaacagcattctggggaggcaggcctttcagaccggatttagtgagcagtcagtaacccagagcttcttgtctgagagcagaagctggagaaaaaagaaagtttcgatcattgatgctccggacatctcatctttaaagaacattgactcagaagttagaaaacacatctgtacaggcccccatgccttcctgctggtgacaccactgggcttttacactaagaatgatgaggcagtgctgagcaccatccaaaacaattttggagaaaaattctttgagtacatgatcatacttcttaccaggaaagaagatttaggggatcaggatctagatacgttcttaagaaacagcaataaagctctctatggtctcatccagaagtgtaaaaacagatatagtgccttcaactaccgggcaacaggagaagaagagcaaaggcaggcggacgagctcctggaaaaaattgagagcatggtgcatcagaatgggaacaagcattgcgttttcagagaaaaagaaaccctgaacattgtccttgtggggagaagcgggactgggaagagtgcgaccgggaactctatcctggggagcctcgtcttcacctctcggctccgggcccagccagtcaccaagaccagccagagtggcaggaggacatgggacggacaggaggtggtggttgtggacactccttccttcaaccagatgctggatgtcgaaaaggacccatcccggttagaagaggaggtcaagcgctgtttgtcctgctgtgaaaaaggggacacattttttgtcctggtgttccagctgggacgattcactgaagaggacaaaacagctgtggcgaaactggaggccatctttggagcagactttacgaaatacgcgattatgctgttcacccggaaggaagacctaggggcggggaatttggaagacttcatgaagaactcagataacaaagcccttcggcgcatttttaaaaagtgtgggcggcgagtttgtgcttttaacaacaaagaaacaggccaggcccaggaaacccaggtgaaagctcttttaacaaaggtcaatgatctgagaaaagaaagtgggtggtccgggtatccccatacacaggagaacgtcagcaaactaattaaaaatgtccaggaaatgtcccaagccgaaaaactccttaaaaatttaataggtattttacaataggtagccgaagtgcctggggtctcttcaattagagacaccctcaggttggggggaggggcggggcatggtacaacctgtgggaagggaagcgggttcatggctttgagggcctgagaggcaaatgcatcccgccttgtgatgtatcagctatttgtagataaataaattgcaggtgggggcgaatagtagggtattataaaggagaaagaagatacaaggtggggaaatctggaaaaagatttcagacattaggctgataataagtggtagaatcaagtcacaagaatcacctcacttgtgtaggtaggttggaatcaggatagacactgtgatcaaggctgaggccacctgggatgagaatatagatagtcgtacaacaacccaggggatccagatacatgagaccagggcagcgttcagcacactcctgggcatggcggaagcaggaagcagactccagagggcctccctgttgtccagggccgttggctccctgagctctcctgtctcctttgggatgcgacttagggctagagtgttcttttcttcacacgttagccattccttacggctcttcacgttccacgcctagatgtgaagtgggacatagtcttccattgctggctgtccctgaggaaacagacatgagtcttggaggttctgaatgattttattgctaattatcacagtgacatagactagaacagaaattagaagcatagtaagattgccaaaatcagagaatcttgcaaagttctgtaattctaagtgttgttctagatttcctctagagaaggttattagaatctccattgcgtttctctttctccttctctttcccttgaggttaggaaacaggttaaaactcagagaactccaataataatggtttaaaaacatcaggggcttcctgtatctcctgtcaggaagccgaggaataagcaggctggggctggtgggcgtcaacatcccagttttgttctatctttctgtcccacctgcactgggatgtggcttctacactcgaatttgcttcttggtttcaagacagtggtgttctttccatagctgagcagattattttgagaggtgggtgatatgtgagagagaaatctggaaccttcttctgggtagatacaggataagatagatacagggtaaaatgttgagcactttgtacatgctttgagagcataatctttgtcatctgtttttttcccctagacaatatcaggttaccgtcaacattaatccatttaaaaggacatggactgttgccattaatacttttggattccatataacccttaacacaataacttctagaaaatgtgtgtgccgtagacacaaagaagggaacaatagacaccagggtatacttgagggtggagggtggcaggagggtgaagattgaaaagctgcctattgcgtgttatgctggtttcctgggtgacaaaattacctgtacaccacacccctgtgacacacaacttactcatgtaacaaacctgtgcatgtaccccttgaacctgaaataaaaattggaaagtaaaaaaaagtgtgtaaatatatttagttgaatcaaataataaagatgaatcattatgaattcacaaaaaaaaaa

SEQ ID NO: 1052 - protein, 665 aa, Homo Sapiens
MSEQSCQMSELRLLLLGKCRSGKSATGNAILGKHVFKSKFSDQTVIKMCQRESWVLRERKVVVIDTPDLFSSIACAEDKQRNIQHCLELSAPSLHALLLVIAIGHFTREDEETAKGIQQVFGAEARRHIIIVFTRKDDLGDDLLQDFIEKNKPLKQLVQDYEGRYCIFNNKTNSKDEQITQVLELLRKVESLVNTNGGPYHVNFKTEGSRFQDCVNEAASQEGDKPQGPRERQLQSTGPEQNPGTSELTVLLVGKRGAGKSAAGNSILGRQAFQTGFSEQSVTQSFLSESRSWRKKKVSIIDAPDISSLKNIDSEVRKHICTGPHAFLLVTPLGFYTKNDEAVLSTIQNNFGEKFFEYMIILLTRKEDLGDQDLDTFLRNSNKALYGLIQKCKNRYSAFNYRATGEEEQRQADELLEKIESMVHQNGNKHCVFREKETLNIVLVGRSGTGKSATGNSILGSLVFTSRLRAQPVTKTSQSGRRTWDGQEVVVVDTPSFNQMLDVEKDPSRLEEEVKRCLSCCEKGDTFFVLVFQLGRFTEEDKTAVAKLEAIFGADFTKYAIMLFTRKEDLGAGNLEDFMKNSDNKALRRIFKKCGRRVCAFNNKETGQAQETQVKALLTKVNDLRKESGWSGYPHTQENVSKLIKNVQEMSQAEKLLKNLIGILQ

SEQ ID NO: 1053 - DNA, 1779 bp, Homo Sapiens
gtcgccccgggacggggaggtggggagctgagggcaagtcgcgcccgcccctgaaatcccagccgcctagcgattggctgcaagggtctcggcttggccgcggattggtcacacccgagggcttgaaaggtggctgggagcgccggacacctcagacggacggtggccagggatcaggcagcggctcaggcgaccctgagtgtgcccccaccccgccatggcccggctgctgcaggcgtcctgcctgctttccctgctcctggccggcttcgtctcgcagagccggggacaagagaagtcgaagatggactgccatggtggcataagtggcaccatttacgagtacggagccctcaccattgatggggaggagtacatccccttcaagcagtatgctggcaaatacgtcctctttgtcaacgtggccagctactgaggcctgacgggccagtacattgaactgaatgcactacaggaagagcttgcaccattcggtctggtcattctgggctttccctgcaaccaatttggaaaacaggaaccaggagagaactcagagatccttcctaccctcaagtatgtccgaccaggtggaggctttgtccctaatttccagctctttgagaaaggggatgtcaatggagagaaagagcagaaattctacactttcctaaagaactcctgtcctcccacctcggagctcctgggtacatctgaccgcctcttctgggaacccatgaaggttcacgacatccgctggaactttgagaagttcctggtggggccagatggtatacccatcatgcgctggcaccaccggaccacggtcagcaacgtcaagatggacatcctgtcctacatgaggcggcaggcagccctgggggtcaagaggaagtaactgaaggccgtctcatcccatgtccaccatgtaggggagggactttgttcaggaagaaatccgtgtctccaaccacactatctacccatcacagacccctttcctatcactcaaggccccagcctggcacaaatggatgcatacagttctgtgtactgccaggcatgtgggtgtgggtgcatgtgggtgtttacacacatgcctacaggtatgcgtgattgtgtgtgtgtgcatgggtgtacagccacgtgtctacctatgtgtctttctgggaatgtgtaccatctgtgtgcctgcagctgtgtagtgctggacagtgacaaccctttctctccagttctccactccaatgataatagttcacttacacctaaacccaaaggaaaaaccagctctaggtccaattgttctgctctaactgatacctcaaccttggggccagcatctcccactgcctccaaatattagtaactatgactgacgtccccagaagtttctgggtctaccacactccccaaccccccactcctacttcctgaagggccctcccaaggctacatccccaccccacagttctccctgagagagatcaacctccctgagatcaaccaaggcagatgtgacagcaagggccacggaccccatggcaggggtggcgtcttcatgagggaggggcccaaagcccttgtgggcggacctcccctgagcctgtctgaggggccagcccttagtgcattcaggctaaggcccctgggcagggatgccacccctgctccttcggaggacgtgccctcacccctcactggtccactggcttgagactcaccccgtctgcccagtaaaagcctttctgcagcagctgaaaaaaaaaaaaaaaaaaa

SEQ ID NO: 1054 - protein, 225 aa, Homo Sapiens
MARLLQASCLLSLLLAGFVSQSRGQEKSKMDCHGGISGTIYEYGALTIDGEEYIPFKQYAGKYVLFVNVASYGLTGQYIELNALQEELAPFGLVILGFPCNQFGKQEPGENSEILPTLKYVRPGGGFVPNFQLFEKGDVNGEKEQKFYTFLKNSCPPTSELLGTSDRLFWEPMKVHDIRWNFEKFLVGPDGIPIMRWHHRTTVSNVKMDILSYMRRQAALGVKRK

SEQ ID NO: 1055 - RNA, 908 nt, Homo Sapiens
gaggaggcgggagcgcgccagagacggcgggcagcccgcccgcggccgggagcacaggcaaagccagcgggcccgagccgggggacggagaacaacgcagcggaggagaaagcaccaacagcagcggcagccaagacccaccccagggccagggcgcaacaagagagagccgaagacacagagagagcagcagaggccgcacccacacaagcaacagaggaaggagcaggcggcgggagccgaagcccaagaaagcacacagggaggaaggagcaacccgaaaaccagccagacacaaacaggcgggaaaccagacccgcaaggcagaaccagcaagggaagggcgaagcagaaaacaaagcgggacaaccaggcgggacccagggccagcgaagggcggggccaacccggggccgaccgagcacgaacaccccgccaccgaccggggaggagggagccacaccaaagccggacccccccagccggaccggaccaacccaccacgcagcagacaagggggccgagggaggaccgggaacagcacaccggacgcaacacgggcaccggaggacagcgcagcgcccgcccaggagaagggaagacacacaacccaacagagcgcgaggagggaaacgcaagggcaccaggaccacccgagcaggaagagaccagaaaagcgcagagcagaccacgggcggacaaaaacgcagaaaaacgggggagagccacggaagccgacagacaaccagcgcaggcggaaaccaagagaagcaccaagcaggcgcgcaagagagcacggcgcacccgccaggggaagaaaacgacccagaaggaaggaaccgaaggacaagagggcgaaggcggcaccgcccccacccaccgcaaaaggaccaaaaaaccccacacac

SEQ ID NO: 1056 - DNA, 2448 bp, Homo Sapiens
agaacacttacaggatgtgtgtagtgtggcatgacagagaactttggtttcctttaatgtgactgtagacctggcagtgttactataagaatcactggcaatcagacacccgggtgtgctgagctagcactcagtgggggcggctactgctcatgtgattgtggagtagacagttggaagaagtacccagtccatttggagagttaaaactgtgcctaacagaggtgtcctctgacttttcttctgcaagctccatgttttcacatcttccctttgactgtgtcctgctgctgctgctgctactacttacaaggtcctcagaagtggaatacagagcggaggtcggtcagaatgcctatctgccctgcttctacaccccagccgccccagggaacctcgtgcccgtctgctggggcaaaggagcctgtcctgtgtttgaatgtggcaacgtggtgctcaggactgatgaaagggatgtgaattattggacatccagatactggctaaatggggatttccgcaaaggagatgtgtccctgaccatagagaatgtgactctagcagacagtgggatctactgctgccggatccaaatcccaggcataatgaatgatgaaaaatttaacctgaagttggtcatcaaaccagccaaggtcacccctgcaccgactcggcagagagacttcactgcagcctttccaaggatgcttaccaccaggggacatggcccagcagagacacagacactggggagcctccctgatataaatctaacacaaatatccacattggccaatgagttacgggactctagattggccaatgacttacgggactctggagcaaccatcagaataggcatctacatcggagcagggatctgtgctgggctggctctggctcttatcttcggcgctttaattttcaaatggtattctcatagcaaagagaagatacagaatttaagcctcatctctttggccaacctccctccctcaggattggcaaatgcagtagcagagggaattcgctcagaagaaaacatctataccattgaagagaacgtatatgaagtggaggagcccaatgagtattattgctatgtcagcagcaggcagcaaccctcacaacctttgggttgtcgctttgcaatgccatagatccaaccaccttatttttgagcttggtgttttgtctttttcagaaactatgagctgtgtcacctgactggttttggaggttctgtccactgctatggagcagagttttcccattttcagaagataatgactcacatgggaattgaactgggacctgcactgaacttaaacaggcatgtcattgcctctgtatttaagccaacagagttacccaacccagagactgttaatcatggatgttagagctcaaacgggcttttatatacactaggaattcttgacgtggggtctctggagctccaggaaattcgggcacatcatatgtccatgaaacttcagataaactagggaaaactgggtgctgaggtgaaagcataacttttttggcacagaaagtctaaaggggccactgattttcaaagagatctgtgatccctttttgttttttgtttttgagatggagtcttgctctgttgcccaggctggagtgcaatggcacaatctcggctcactgcaagctccgcctcctgggttcaagcgattctcctgcctcagcctcctgagtggctgggattacaggcatgcaccaccatgcccagctaatttgttgtatttttagtagagacagggtttcaccatgttggccagtgtggtctcaaactcctgacctcatgatttgcctgcctcggcctcccaaagcactgggattacaggcgtgagccaccacatccagccagtgatccttaaaagattaagagatgactggaccaggtctaccttgatcttgaagattcccttggaatgttgagatttaggcttatttgagcactgcctgcccaactgtcagtgccagtgcatagcccttcttttgtctcccttatgaagactgccctgcagggctgagatgtggcaggagctcccagggaaaaacgaagtgcatttgattggtgtgtattggccaagttttgcttgttgtgtgcttgaaagaaaatatctctgaccaacttctgtattcgtggaccaaactgaagctatatttttcacagaagaagaagcagtgacggggacacaaattctgttgcctggtggaaagaaggcaaaggccttcagcaatctatattaccagcgctggatcctttgacagagagtggtccctaaacttaaatttcaagacggtataggcttgatctgtcttgcttattgttgccccctgcgcctagcacaattctgacacacaattggaacttactaaaaatttttttttactgttaaaaaaaaaaaaaaaaaa

SEQ ID NO: 1057 - protein, 301 aa, Homo Sapiens
MFSHLPFDCVLLLLLLLLTRSSEVEYRAEVGQNAYLPCFYTPAAPGNLVPVCWGKGACPVFECGNVVLRTDERDVNYWTSRYWLNGDFRKGDVSLTIENVTLADSGIYCCRIQIPGIMNDEKFNLKLVIKPAKVTPAPTRQRDFTAAFPRMLTTRGHGPAETQTLGSLPDINLTQISTLANELRDSRLANDLRDSGATIRIGIYIGAGICAGLALALIFGALIFKWYSHSKEKIQNLSLISLANLPPSGLANAVAEGIRSEENIYTIEENVYEVEEPNEYYCYVSSRQQPSQPLGCRFAMP

SEQ ID NO: 1058 - DNA, 1413 bp, Homo Sapiens
ttgtgattgtttttagtttgttagctgcctggagtgttattttaagaaagcagaagcaccatcatttgcacactccttatagatcacacaccttaaccctgactttttttgctccagtttttcagaagaagtgaagtcaagatgaagaaccatttgcttttctggggagtcctggcggtttttattaaggctgttcatgtgaaagcccaagaagatgaaaggattgttcttgttgacaacaaatgtaagtgtgcccggattacttccaggatcatccgttcttccgaagatcctaatgaggacattgtggagagaaacatccgaattattgttcctctgaacaacagggagaatatctctgatcccacctcaccattgagaaccagatttgtgtaccatttgtctgacctctgtaaaaaatgtgatcctacagaagtggagctggataatcagatagttactgctacccagagcaatatctgtgatgaagacagtgctacagagacctgctacacttatgacagaaacaagtgctacacagctgtggtcccactcgtatatggtggtgagaccaaaatggtggaaacagccttaaccccagatgcctgctatcctgactaatttaagtcattgctgactgcatagctctttttcttgagaggctctccattttgattcagaaagttagcatatttattaccaatgaatttgaaaccagggcttttttttttttttgggtgatgtaaaaccaactccctgccaccaaaataattaaaatagtcacattgttatctttattaggtaatcacttcttaattatatgttcatactctaagtatcaaaatcttccaattatcatgctcacctgaaagaggtatgctctcttaggaatacagtttctagcattaaacaaataaacaaggggagaaaataaaactcaaggactgaaaatcaggaggtgtaataaaatgttcctcgcattcccccccgcttttttttttttttttgactttgccttggagagccagagcttccgcattttctttactattctttttaaaaaaagtttcactgtgtagagaacatatatgcataaacataggtcaattatatgtctccattagaaaaataataattggaaaacatgttctagaactagttacaaaaataatttaaggtgaaatctctaatatttataaaagtagcaaaataaatgcataattaaaatatatttggacataacagacttggaagcagatgatacagacttctttttttcataatcaggttagtgtaagaaattgccatttgaaacaatccattttgtaactgaaccttatgaaatatatgtatttcatggtacgtattctctagcacagtctgagcaattaaatagattcataagcataaaaa

SEQ ID NO: 1059 - protein, 159 aa, Homo Sapiens
MKNHLLFWGVLAVFIKAVHVKAQEDERIVLVDNKCKCARITSRIIRSSEDPNEDIVERNIRIIVPLNNRENISDPTSPLRTRFVYHLSDLCKKCDPTEVELDNQIVTATQSNICDEDSATETCYTYDRNKCYTAVVPLVYGGETKMVETALTPDACYPD

SEQ ID NO: 1060 - DNA, 347 bp, Homo Sapiens
atggaagccccagctcagcttctcttcctcctgctactctggctcccagataccaccggagaaattgtgttgacacagtctccagccaccctgtctttgtctccaggggaaagagccaccctctcctgcagggccagtcagagtgttagcagctacttagcctggtaccaacagaaacctggccaggctcccaggctcctcatctatgatgcatccaacagggccactggcatcccagccaggttcagtggcagtgggtctgggacagacttcactctcaccatcagcagcctagagcctgaagattttgcagtttattactgtcagcagcgtagcaactggcctcc

SEQ ID NO: 1061 - protein, 116 aa, Homo Sapiens
MEAPAQLLFLLLLWLPDTTGEIVLTQSPATLSLSPGERATLSCRASQSVSSYLAWYQQKPGQAPRLLIYDASNRATGIPARFSGSGSGTDFTLTISSLEPEDFAVYYCQQRSNWPP

SEQ ID NO: 1062 - DNA, 1484 bp, Homo Sapiens
cccgtgaggaggaaaaggtgtgtccgctgccacccagtgtgagcgggtgacaccacccggttaggaaatcccagctcccaagagggtataaatccctgctttactgctgagctcctgctggaggtgaaagtctggcctggcagccttccccaggtgagcagcaacaaggccacgtgctgctgggtctcagtcctccacttcccgtgtcctctggaagttgtcaggagcaatgttgcgcttgtacgtgttggtaatgggagtttctgccttcacccttcagcctgcggcacacacaggggctgccagaagctgccggtttcgtgggaggcattacaagcgggagttcaggctggaaggggagcctgtagccctgaggtgcccccaggtgccctactggttgtgggcctctgtcagcccccgcatcaacctgacatggcataaaaatgactctgctaggacggtcccaggagaagaagagacacggatgtgggcccaggacggtgctctgtggcttctgccagccttgcaggaggactctggcacctacgtctgcactactagaaatgcttcttactgtgacaaaatgtccattgagctcagagtttttgagaatacagatgctttcctgccgttcatctcatacccgcaaattttaaccttgtcaacctctggggtattagtatgccctgacctgagtgaattcacccgtgacaaaactgacgtgaagattcaatggtacaaggattctcttcttttggataaagacaatgagaaatttctaagtgtgagggggaccactcacttactcgtacacgatgtggccctggaagatgctggctattaccgctgtgtcctgacatttgcccatgaaggccagcaatacaacatcactaggagtattgagctacgcatcaagaaaaaaaaagaagagaccattcctgtgatcatttcccccctcaagaccatatcagcttctctggggtcaagactgacaatcccgtgtaaggtgtttctgggaaccggcacacccttaaccaccatgctgtggtggacggccaatgacacccacatagagagcgcctacccgggaggccgcgtgaccgaggggccacgccaggaatattcagaaaataatgagaactacattgaagtgccattgatttttgatcctgtcacaagagaggatttgcacatggattttaaatgtgttgtccataataccctgagttttcagacactacgcaccacagtcaaggaagcctcctccacgttctcctggggcattgtgctggccccactttcactggccttcttggttttggggggaatatggatgcacagacggtgcaaacacagaactggaaaagcagatggtctgactgtgctatggcctcatcatcaagactttcaatcctatcccaagtgaaataaatggaatgaaataattcaaacacaaaaaaaaaaaaaaaaaaaaaaaaaaaaaa

SEQ ID NO: 1063 - protein, 398 aa, Homo Sapiens
MLRLYVLVMGVSAFTLQPAAHTGAARSCRFRGRHYKREFRLEGEPVALRCPQVPYWLWASVSPRINLTWHKNDSARTVPGEEETRMWAQDGALWLLPALQEDSGTYVCTTRNASYCDKMSIELRVFENTDAFLPFISYPQILTLSTSGVLVCPDLSEFTRDKTDVKIQWYKDSLLLDKDNEKFLSVRGTTHLLVHDVALEDAGYYRCVLTFAHEGQQYNITRSIELRIKKKKEETIPVIISPLKTISASLGSRLTIPCKVFLGTGTPLTTMLWWTANDTHIESAYPGGRVTEGPRQEYSENNENYIEVPLIFDPVTREDLHMDFKCVVHNTLSFQTLRTTVKEASSTFSWGIVLAPLSLAFLVLGGIWMHRRCKHRTGKADGLTVLWPHHQDFQSYPK

SEQ ID NO: 1064 - DNA, 3357 bp, Homo Sapiens
gtgatgctgctgctgctgctgctgctgccgccgccgcctctattgctgatactctagtggggctggaagggtggttcctattcgcaccatcgccaaccagagacagagggaaaaaaaaaaccggcagccactgctgatgttgggttcggaggctgcatccgactcggtcacaaggaaaatggattcagtttgcatctctccctcctttaaacagcttctccgggtctcagcatgggcttccagggcagcgattgaggagaccttaccaaggagcaccacacagtagatgctgagacatcgtactccaggataagaaacagtaacatggcagcacctgcttgaaagaaattaaaaaccaacagactccatttagaaaggaacaatgtccaagaaagggcgaaataagggcgagaagcccgaggcactcattgttgcccttcaagctgccaatgaagacctcaggaccaagctcacagacattcagatagagctgcatcaagagaagtccaaggtatcaaagcttgaaagagagaagactcaagaagcgaagaggattcgtgagctggagcagcgcaagcacacggtgctggtgacagaactcaaagccaagctccatgaggagaagatgaaggagctgcaggctgtgagggagaaccttatcaagcagcacgagcaggaaatgtcaaggacggtgaaggtacgtgatggagagatccagaggctcaagtctgctctctgtgctctccgcgacggcagcagtgacaaagtaaggacagcgctcaccattgaggcccgggaggaggcccggaaactgtttgacacagagcgccttaagctcttacaggaaattgcggacctgaaaacggccaagaagcaggtggacgaggctctgagcaatatgatccaagcagataaaatcaaggctggggaccttcggagtgagcatcagtcccaccaagaagccatctcgaagatcaagtgggagtcggagcgggatattcggaggctgatggatgaaatcaaagccaaggacaggatcatcttttccctggaaaaggaactggagacccagacaggctatgtacagaaactccaacttcagaaggaggctttggacgaacaactctttctggtcaaggaggctgagtgcaacatgagcagcccaaaacgagaaattccaggaagggcaggtgatggttccgaacactgcagcagtcctgatttgcgaagaaatcaaaagagaatagctgaattgaatgccactataagaaaattagaagacaggaataccttgcttggagatgaacgaaatgaactgttaaaacgtgtgcgggaaaccgaaaagcaatgtaaacctctcctggaaaggaacaagtgcctcgccaagagaaacgatgaactgatggtgtccttgcagcgcatggaagaaaaactaaaagccgttaccaaggaaaattcagaaatgagagaaaaaataacatcccatccacccctgaagaaattaaaatctctgaatgacctcgaccaagctaatgaagaacaagaaacagagtttctaaaacttcaggtcattgagcaacagaacattattgatgagctcacaagggaccgagaaaagctcatccgtagaagaaagcatagaagaagttccaagccaattaagaggcctgttttggacccgtttattggctatgatgaggactctatggattcagagacatcatccatggcctcatttagaacagacagaacaccagctactcctgatgatgacttggatgaaagtttagcagctgaagaatctgaactaagatttcgacaattaacaaaagaatatcaggccctccaaagagcatatgccctcctacaggagcagacgggaggcatcatcgacgctgaacgagaagccaaggctcaagaacagctccaagcagaggtgctaaggtataaagccaaaattgaagacctggaagcgactctggctcagaaagggcaggattcacactgggtagaagataaacaacttttcattaagagaaaccaggagcttttagaaaagatagaaaaacaggaggcagaaaatcaccggttacaacaagaactacaggacgccagagaccagaatgagctgctggagtttcgaaacctagagctagaagagagagagagacgatcccctccatttaatctccaaattcacccattctcagatggtgtgagtgctctacagatctactgtatgaaagaaggtgttaaggatgtgaacatccctgatctcataaagcagcttgatatcttgggtgataatgggaatttaagaaatgaagaacaagtggccataattcaggccagcactgtgctgtccctggcagagaagtggatccagcagattgaaggagctgaggctgccctacaccagaaaatgatggaattggaaagtgacatggaacagttctgcaaaataaaaggctatctggaggaagaactagactacagaaaacaagctcttgaccaagcatatatgagaatccaggaactagaagctactttgtacaatgctctacagcaagaaactgttatcaagtttggtgaattattaagtgaaaaacagcaagaggagctgaggacggcagtagaaaagttacggcggcaaatgctgaggaagagcagagagtatgactgtcagattcttcaggagagaatggagctcttacagcaagcccatcagagaattcgtgacttagaagataaaacagacatccagaaaagacaaataaaagacttagaagaaaagagtaaccgaaaacatggataagatcccaggaagacaagtgcttctaaaccttcaaagatggcaaaattgtttacaccagtgagagggagatcaaaagctaagaactaccctgtagccaggactacaactgtgtattttaaagccattattcaaggtttcttacttgacagttcctacacaaccctgttgaaaatctacaatatatgctgcatttaatgaaacatgtatatgtcaaatcagaagagaagaactataaacatatattgtgtaaagaaaaagttcagcaatggaactagtttctgcagatcaagcaaagatgtgtcttgggcatggaaccaaagttacaatgaaatattcaacccctgctgtgcaggggggtcattttaatgtaacaccacaccccatggaaacactagtcctgataataaacatcattttaaaagatcaaaacaaacaaacaaaaaaaacaagggtgggtggggagtgaagcacgaggaatacctatgaagagctatttacaataaaatgtttcatttgaaaagtcaaaaaaaaaaaaaaaaaaa

SEQ ID NO: 1065 - protein, 810 aa, Homo Sapiens
MSKKGRNKGEKPEALIVALQAANEDLRTKLTDIQIELHQEKSKVSKLEREKTQEAKRIRELEQRKHTVLVTELKAKLHEEKMKELQAVRENLIKQHEQEMSRTVKVRDGEIQRLKSALCALRDGSSDKVRTALTIEAREEARKLFDTERLKLLQEIADLKTAKKQVDEALSNMIQADKIKAGDLRSEHQSHQEAISKIKWESERDIRRLMDEIKAKDRIIFSLEKELETQTGYVQKLQLQKEALDEQLFLVKEAECNMSSPKREIPGRAGDGSEHCSSPDLRRNQKRIAELNATIRKLEDRNTLLGDERNELLKRVRETEKQCKPLLERNKCLAKRNDELMVSLQRMEEKLKAVTKENSEMREKITSHPPLKKLKSLNDLDQANEEQETEFLKLQVIEQQNIIDELTRDREKLIRRRKHRRSSKPIKRPVLDPFIGYDEDSMDSETSSMASFRTDRTPATPDDDLDESLAAEESELRFRQLTKEYQALQRAYALLQEQTGGIIDAEREAKAQEQLQAEVLRYKAKIEDLEATLAQKGQDSHWVEDKQLFIKRNQELLEKIEKQEAENHRLQQELQDARDQNELLEFRNLELEERERRSPPFNLQIHPFSDGVSALQIYCMKEGVKDVNIPDLIKQLDILGDNGNLRNEEQVAIIQASTVLSLAEKWIQQIEGAEAALHQKMMELESDMEQFCKIKGYLEEELDYRKQALDQAYMRIQELEATLYNALQQETVIKFGELLSEKQQEELRTAVEKLRRQMLRKSREYDCQILQERMELLQQAHQRIRDLEDKTDIQKRQIKDLEEKSNRKHG

SEQ ID NO: 1066 - DNA, 1834 bp, Homo Sapiens
ggggcttccttccctctttgtaggatggacgaggagtcactagatgggctgctcttcaaagaccacgacttctcttctgacttgttgaggcagctcaacagcttaaggcaaagcaggatcctgactgatgtgagcatctgtgccggtgcccgggagatcccctgccaccgcaacgtgctggcctccagcagcccctacttcagggctatgttctgcagcagcttccgggagaagagtgaagccaaagtgcagctgaaaggcattgaccccccaaccctggaccagatcgtctcctacgtgtatacgggggaggcacatattgccactgacaatgtcctccccgtgatggaggccgcctccatgctacagttccccaagctgtttgaggcctgctcctcgtacttgcagagccagttggcccccagcaactgcctgggtatgatcagactctcagaaatcttaagctgcgagaccctcaagaagaaagccagggaggtggcactgacgtccttcccagaggtggccgcatcggccgacctgaaggagctctgtgccttggagttgagggactatctcggagatgatgggctctgtggggaggaggaaaaggtgtttgaggccctcatggtttggatcaagcatgacctccaggcccggaagcgatacatgcaggaactgttcaagcaggtcaggctgcagtacatccacccagccttctttcaccacttcatcgccaacgatgccctcctgcagtcctcgcctgcatgccagatcatcttggagaccgccaagagacagatgttctctttgtgtggcaccaccgtcccagactgcaaactcctgttgcatgtccctccaagaaactcttaccaagatttcctcatcctcttgggcggaaggaaggacagccagcagaccaccagggacgtcctactgtacagcaaacagaccggccaatggcagagccttgccaaactcccgacacggctgtacaaggcctctgccatcaccttgcaccgcagcatctatgtgctggggggcatggctgtcagctcagggaggagtctggtcagtcacaatgtctacatcttctccctgaaactcaatcagtggaggctgggggagcccatgctggtggcccgctactcccacagaagcactgcccataagaacttcatcttctccatcggggggattggagaagggcaggagctcatgggctccatggaaaggtatgacagcatctgcaatgtctgggagagtatggccagcatgcccgtgggggtgctccaccccgcagtcgctgtgaaagaccaaagactctatctctttggaggagaggacatcatgcagaaccctgtgcgccttatccaggtttatcacatttccagaaactcgtggttcaaaatggagacaagaatgatcaagaacgtgtgtgcccctgcagtggtgcttggggagcggattgtcattgtgggaggttacacaaggaggattcttgcttatgaccctcaatccaacaaatttgtcaaatgtgcggacatgaaagaccggaggatgcaccatggggccacagtgatgggaaacaaactctacgtgacgggcgggcggcggctgaccacggactgcaacattgaggactccgcctccttcgattgctacgaccccgagacggacacctggacatcccagggacagctgccgcacaagctctttgaccatgcctgcctcactctccagtgcataccccgcacgtctggcctcccatgaggtcgacaagaaaccttctgccctagtcaaaatgccttctgtcgccagggacacaaacccagct

SEQ ID NO: 1067 - protein, 581 aa, Homo Sapiens
MDEESLDGLLFKDHDFSSDLLRQLNSLRQSRILTDVSICAGAREIPCHRNVLASSSPYFRAMFCSSFREKSEAKVQLKGIDPPTLDQIVSYVYTGEAHIATDNVLPVMEAASMLQFPKLFEACSSYLQSQLAPSNCLGMIRLSEILSCETLKKKAREVALTSFPEVAASADLKELCALELRDYLGDDGLCGEEEKVFEALMVWIKHDLQARKRYMQELFKQVRLQYIHPAFFHHFIANDALLQSSPACQIILETAKRQMFSLCGTTVPDCKLLLHVPPRNSYQDFLILLGGRKDSQQTTRDVLLYSKQTGQWQSLAKLPTRLYKASAITLHRSIYVLGGMAVSSGRSLVSHNVYIFSLKLNQWRLGEPMLVARYSHRSTAHKNFIFSIGGIGEGQELMGSMERYDSICNVWESMASMPVGVLHPAVAVKDQRLYLFGGEDIMQNPVRLIQVYHISRNSWFKMETRMIKNVCAPAVVLGERIVIVGGYTRRILAYDPQSNKFVKCADMKDRRMHHGATVMGNKLYVTGGRRLTTDCNIEDSASFDCYDPETDTWTSQGQLPHKLFDHACLTLQCIPRTSGLP

SEQ ID NO: 1068 - DNA, 2199 bp, Homo Sapiens
acgtgatccacccgcctcggcctcccaaagtttttggattacaggtgtgagccacctcgcccggtcctatctctctttcttctctttctccctctcactttgtttctcttctctctctctctcccgcctccttcccccgtctcccctcccttccccccaccgccctcttcatagctgagcctgtccggcagtgcggcggatgtacggatgattcagtggctggcaggaagcccgccctgcccgcccgccagtgtcagtggtgttggcatcagcttgggcaggtgtgcgggctcaggatggggcggccgtggtgaggaaccctggactctcagagatggaatttcaccgtgttgcctaggctggtctggagctcttgatctcaagcgatcctccctgcctcggcctcccaacgtgctgggattataggcgtgagccaccgctcctggccagggtctgttcctagttgcaacagttcttggaaacccactcgagagggccacgcctccattcaccaggccacgcatcacaagaggcaacaccaggagccaacatgagctcggggactgaactgctgtggcccggagcagcgctgctggtgctgttgggggtggcagccagtctgtgtgtgcgctgctcacgcccaggtgcaaagaggtcagagaaaatctaccagcagagaagtctgcgtgaggaccaacagagctttacggggtcccggacctactccttggtcgggcaggcatggccaggacccctggcggacatggcacccacaaggaaggacaagctgttgcaattctaccccagcctggaggatccagcatcttccaggtaccagaacttcagcaaaggaagcagacacgggtcggaggaagcctacatagaccccattgccatggagtattacaactgggggcggttctcgaagcccccagaagatgatgatgccaattcctacgagaatgtgctcatttgcaagcagaaaaccacagagacaggtgcccagcaggagggcataggtggcctctgcagaggggacctcagcctgtcactggccctgaagactggccccacttctggtctctgtccctctgcctccccggaagaagatgaggaatctgaggattatcagaactcagcatccatccatcagtggcgcgagtccaggaaggtcatggggcaactccagagagaagcatcccctggcccggtgggaagcccagacgaggaggacggggaaccggattacgtgaatggggaggtggcagccacagaagcctagggcagaccaagaagaaaggagccaaggcaaagagggaccactgtgctcatggacccatcgctgccttccaaggaccatttcccagagctactcaacttttaagcccctgccatggttgctcctggaaggagaaccagccaccctgaggaccacctggccatgcgtgcacagcctgggaaaagacagttactcacgggagctgcaggcccgtcaccaagccctctcccgacccaggctttgtggggcaggcacctggtaccaagggtaacccggctcctggtatggacggatgcgcaggatttaggataagctgtcacccagtccccataacaaaaccactgtccaacactggtatctgtgttcttttgtgctatgaatttggattcctaattgctattgttggttgctggggttttaaatgattgataagcttgtacagttaacttatagagggggagccatatttaacattctggatttcagagtagagatttctgtgttgtctcctagaaagcattacatgtagtttatttcagcatccttgttgggtggggccctggctctcttcccctttggtgggacctcccctttctttgggcttcagttcactcaggaagaaatgaggctgtcgccatctttatgtgcttccagtggaaatgtcacttgctacagacaatagtgcatgagagtctagagaagtagtgaccagaacagggcagagtaggtcccctccatggccctgaatcctcctctgctccagggctggcctctgcagagctgattaaacagtgttgtgactgtctcatgggaagagctggggcccagagggaccttgagtcagaaatgttgccagaaaaagtatctcctccaaccaaaacatctcaataaaaccattttagttgaaaagcaaaaaaaaa

SEQ ID NO: 1069 - protein, 243 aa, Homo Sapiens
MSSGTELLWPGAALLVLLGVAASLCVRCSRPGAKRSEKIYQQRSLREDQQSFTGSRTYSLVGQAWPGPLADMAPTRKDKLLQFYPSLEDPASSRYQNFSKGSRHGSEEAYIDPIAMEYYNWGRFSKPPEDDDANSYENVLICKQKTTETGAQQEGIGGLCRGDLSLSLALKTGPTSGLCPSASPEEDEESEDYQNSASIHQWRESRKVMGQLQREASPGPVGSPDEEDGEPDYVNGEVAATEA

SEQ ID NO: 1070 - DNA, 2669 bp, Homo Sapiens
ttcccggtggctggctgctctgattggctgaacaaatagtccgagggtggtgggcatccgccctcccgacaaggcagaccaggccccctgcaggtcccctatccgcaccccggcccctgagagctggcactgcgactcgagacagcggcccggcaggacagctccaggtgagagtgccggcgccgcggcgctgccagaatgaaaatgcggttcttggggttggtggtctgtttggttctctggaccctgcattctgaggggtctggagggaaactgacagctgtggatcctgaaacaaacatgaatgtgagtgaaattatctcttactggggattccctagtgaggaatacctagttgagacagaagatggatatattctgtgccttaaccgaattcctcatgggaggaagaaccattctgacaaaggtcccaaaccagttgtcttcctgcaacatggcttgctggcagattctagtaactgggtcacaaaccttgccaacagcagcctgggcttcattcttgctgatgctggttttgacgtgtggatgggcaacagcagaggaaatacctggtctcggaaacataagacactctcagtttctcaggatgaattctgggctttcagttatgatgagatggcaaaatatgacctaccagcttccattaacttcattctgaataaaactggccaagaacaagtgtattatgtgggtcattctcaaggcaccactataggttttatagcattttcacagatccctgagctggctaaaaggattaaaatgttttttgccctgggtcctgtggcttccgtcgccttctgtactagccctatggccaaattaggacgattaccagatcatctcattaaggacttatttggagacaaagaatttcttccccagagtgcgtttttgaagtggctgggtacccacgtttgcactcatgtcatactgaaggagctctgtggaaatctctgttttcttctgtgtggatttaatgagagaaatttaaatatgtctagagtggatgtatatacaacacattctcctgctggaacttctgtgcaaaacatgttacactggagccaggctgttaaattccaaaagtttcaagcctttgactggggaagcagtgccaagaattattttcattacaaccagagttatcctcccacatacaatgtgaaggacatgcttgtgccgactgcagtctggagcgggggtcacgactggcttgcagatgtctacgacgtcaatatcttactgactcagatcaccaacttggtgttccatgagagcattccggaatgggagcatcttgacttcatttggggcctggatgccccttggaggctttataataaaattattaatctaatgaggaaatatcagtgaaagctggacttgagctgtgtaccaccaagtcaatgattatgtcatgtgaaaatgtgtttgcttcatttctgtaaaacacttgtttttctttcccaggtcttttgtttttttatatccaagaaaatgataactttgaagatgcccagttcactctagtttcaattagaaacatactagctattttttctttaattagggctggaataggaagccagtgtctcaaccatagtattgtctctttaagtcttttaaatatcactgatgtgtaaaaaggtcattatatccattctgtttttaaaatttaaaatatattgactttttgcccttcataggacaaagtaatatatgtgttggaattttaaaattgtgttgtcattggtaaatctgtcactgacttaagcgaggtataaaagtacgcagttttcatgtccttgccttaaagagctctctagtctaacggtcttgtagttagagatctaaatgacattttatcatgttttcctgcagcaggtgcatagtcaaatccagaaatatcacagctgtgccagtaataaggatgctaacaattaattttatcaaacctaactgtgacagctgtgatttgacacgttttaattgctcaggttaaatgaaatagttttccggcgtcttcaaaaacaaattgcactgataaaacaaaaacaaaagtatgttttaaatgctttgaagactgatacactcaaccatctatattcatgagctctcaatttcatggcaggccatagttctacttatctgagaagcaaatccctgtggagactataccactattttttctgagattaatgtactcttggagcccgctactgtcgttattgatcacatctgtgtgaagccaaagccccgtggttgcccatgagaagtgtccttgttcattttcacccaaatgaagtgtgaacgtgatgttttcggatgcaaactcagctcagggattcattttgtgtcttagttttatatgcatccttatttttaatacacctgcttcacgtccctatgttgggaagtccatatttgtctgcttttcttgcagcatcatttccttacaatactgtccggtggacaaaatgacaattgatatgtttttctgatataattactttagctgcactaacagtacaatgcttgttaatggttaatataggcagggcgaatactactttgtaacttttaaagtcttaaacttttcaataaaattgagtgagacttataggcccaaagaaaaaaaaaaaaaa

SEQ ID NO: 1071 - protein, 399 aa, Homo Sapiens
MKMRFLGLVVCLVLWTLHSEGSGGKLTAVDPETNMNVSEIISYWGFPSEEYLVETEDGYILCLNRIPHGRKNHSDKGPKPVVFLQHGLLADSSNWVTNLANSSLGFILADAGFDVWMGNSRGNTWSRKHKTLSVSQDEFWAFSYDEMAKYDLPASINFILNKTGQEQVYYVGHSQGTTIGFIAFSQIPELAKRIKMFFALGPVASVAFCTSPMAKLGRLPDHLIKDLFGDKEFLPQSAFLKWLGTHVCTHVILKELCGNLCFLLCGFNERNLNMSRVDVYTTHSPAGTSVQNMLHWSQAVKFQKFQAFDWGSSAKNYFHYNQSYPPTYNVKDMLVPTAVWSGGHDWLADVYDVNILLTQITNLVFHESIPEWEHLDFIWGLDAPWRLYNKIINLMRKYQ

SEQ ID NO: 1072 - DNA, 2077 bp, Homo Sapiens
gggaaggggagcttcacagggggttttctggaagtgcccagggtgaaactgtgcttgaaggaagctcagatgtcagtttttcagattgtgctgtctgtatatctaggcattcataaatactttctagaactttgtgtagtgttttgcaaatgtagttaaacagatttgtgaattcagtaatttataaaaacttaagcttgtgttcttctgaatccctttatttttcttctgcctccgaattagacacttcccctatgcattaattccaagtacagtcaaagattaagtaaggaaatgatgtgcatgaaaaaagttctgcatgtttgctaataatctaatgactgtgacatctaaacactggaaacaccttgatttatggataatagggctatctagaattttcaagggatcatggacaaataattataggcaatttgatcaagtgaccatgtaagaccattggtgcagatacagactgattaaagtggaaaaagttcttttttcttcctagcttcctgctctgccattaccttgataatgtgagccaaggcctattggcctccacaggacaagccctaggctgtagtctgggcttgcttgaacctgcctgacctgtcacttcaaggccagccctgatcctctgagaatgggcctgggaaccatcagaaattatgtctatttgcagcaggcagggcctcttttggtctccagcatagcccttgccccatctgctcttttcactttacatggagtactaggcaaagtggcttcctctttgggttttgttacatactttaaccaagactgtgcatgcaaatggcctggcatgtactcggtgctcaggatgttgcagctactgaattattatcattgatttcttctgcgtgtgacctggatccacaagtcaaatgcaaaaatttgtcttgactgatggtcctctcctgtctccctccagtaccccctcttgaggcttgcaggggcagggaccagagggcccagcaccatgtcctgctaatgctcactcctgactgcaagggagtcagggttgggagacgctgtaacaggagaggctacagctgactgggatgcagaccgggggctgggtccttaggaaatttgttctaatcttagaaggtatgccctggcttcctgctgcagcctgaaggacaagtgtcccagacctcaggacacacacgcacacgcacactcacactgtcacttgactcctgcctgggaggcaggaatggcccctagtgaagggtacttgtgtgggcctccaggtggctgtaacataccccaggactccaggcaatcctggaaaggtggctcctggagaccaaccacccttcagactcagaggagctctctgtgaagtcaattttattattgaactaaccaacagtagagagtcagagtagtgcataacagggagattctgaacttaccttggagagtaacaaatcgtacatttacttgttggcttaggtgagtaaatccatctaaatcacccatgccagctatgaagagacacttctttcccactctttccctttgcaaaagaaaaaaaaaaaaaaaaccactcgagctgttcagaggctgccagactgacaaggttgagtttgatcggcagctctgcccctgcatgcctgctggtgggaaaaggaaagagaagacaaaaatggttgtgtgtaaccccctgaggcattgctgccttctgcctcttcatcccagcaccctctccatctcctctgcagcctttgctcaccctccctgtcttcagcctctgccatcaccttgtaatttgagccaagattcaccctcaggtttgtctgactccacaaatcccaagcaggtgcttcagggtctgccgtgggccctccactctggcaactcaccctttctgagcactcctccagtcctgctcctcccctcggctccccctctctgtaaatgacactcctctccacccagaagccagagccagaaatctgggcatcatcttgactccaccctgccccacccatcagtccccaattctggtcagtccttcctcctaaattgcttttgagtcctatca

SEQ ID NO: 1073 - protein, 147 aa, Homo Sapiens
MPAMKRHFFPTLSLCKRKKKKKPLELFRGCQTDKVEFDRQLCPCMPAGGKRKEKTKMVVCNPLRHCCLLPLHPSTLSISSAAFAHPPCLQPLPSPCNLSQDSPSGLSDSTNPKQVLQGLPWALHSGNSPFLSTPPVLLLPSAPPLCK

SEQ ID NO: 1074 - RNA, 2711 nt, Homo Sapiens
ccaacaaagaggcgcggacgaccaagcgcgcacgcaccggcgcgcacgcgaccgccgcaagccccccgcgcagccaccccgagacgcggccgagacggggagggggaagcccgccggggggcggcagggccgggcggccccggcgcggaggcgcacgggcgcaccggacgggagcgaccccgagagagcccgcgggcagcgcaagcagcggacggcccgaagcccgcgccgaccccgacaaccgacgccggggccgaggagcagaggaccggcgaccgcgcggaggcgcggaccggggcagggccaggagcgcccggaagcccggcgggggaagggcaggccccaccgggacagccggcccccagccaacgacacggccagggcggcggcgcggcagcagcgggggagaacgggagggacccgcggagcgaggaccaggaccggcacaagaggggcgaggaggcaggcccaccagccacgggacccaagggacgccagaacacagacgacccagcacgcaggacgcgggccgccaacacgacaccccccaccacacgagacgcaccgcaccaccggcggaagcgagacaggggagggccggacggaggaggaccgaagacggaggggaggcacaggagaagagaagaccaccacgcgacacacaaaagcacccaaggggcagagacagacccaaaggagagcgaagggccggaaaacgggccaccccacgggaagacagggcaaccggggccccacgaagacagggcgcgaagagacccagagaccgggagcagccaccccacgggaaagcaggcagccccaggcgcacggcgcagagacagacagaacgcggccgaagaggaccacgcggcgcagcacccacggcagaacaggcaggccaaggcccccgcccaggaggggcgcagacagcagcagcagcagcagcagcagcagcagcagcagcagaggccggcccgaggaagcggccgggaggaaggaaggaagcccaccaccagacacccccagccggaggaagcccagccagcagcaggaccagcagggagccagagcccgcaagcgcagccacaccccgccagcagcccagcagcccagcagccagccacacccaccagggccccgcccccagcccccacggcccaggaccgacacaccaccccgggcccaaggaggcaggagggaacaagccacagaggaagcaaaaccaaacaaaaaaccaccgacaccggccaagcccccaaaccaccccgacccaaacacgccgcaccccagacccacgaccgacagaggcccccacgcaggcgcagagcagcccagcgcagggcagaggaaagaaagaagggaaagggaacaggggagaggagccagcccggaaaacccaggaacccagcacggggagagcagggagcccgacacaggggcccagaggaccaggggggaccccagcccccccgggccccacccaccacagagccacgcggacagagccagcggacacagagccacgcgggacaaacaccgaaagccccagggcccagcgccgaggaaaaaaccagccgagggaaaccgccaggagccagggcagcaggaccacagccaccggcccacccgccccaggcccggacccaagaacccagagcagagggcacaggggggagaccggagcccaggcaacccgagcgccaggagagagccccccaccggacacccgcccacgcggagcgaccaggggcgcacagagcagagacgagacggcaccgaggagaagggaggcaggcacccggagagggaagaagagcggcggcagagggagcggcccacacagcccagccccccgcgagacccccccggagaagcagaggccggggagcccaggagggcagaccggggccgagggagcaccacaggaggaagcaacccaaggaagaccccaggcggaaggagcagccaccacgggccggggagcaagcggagaaacagcacggccacccagcccggccaaggggaaaagccggaagacccaggggggaggaagcgcgcccaaggcccaggacgcgaggcgacggggaaaacgcaggaccgcgaagccacacccgggaccacccagacgccgccgcacaggagcccccgcaccccaggaccccggcacaggggacagaccccacggacgcagcacagggaccccaaggggcaggaccacccgagcaggaagacaccagaaaagcgcagagcagaccacgggcggacaaaaaccagaaaaacgggggagagccacggaagccgacagacaaccaggcagcccaagacaccccgcggcacgccgccgccggaggagccccaagccaacaaggccacacggggccagaaaacaccgggaacgagggaccggaaggcagaggaccccacacccagagcgggagaagaccacgcccccaaacagagcaacaacaagacgggccagcagcaccgagccgacgcccgagcagggaggcccgcagaagcacagcgccaggagcaagaagggagcaccgggagaagcagggccccgcagaagcaaggccagcccccaccccacccacaggggccggagcgcaggacccaggggaggggccccgcacccaagccacagcccccgcgacccagaaaccccaaaaaacgcagccagaaaaaaaaaaaaaaaaaaaaaaaaaaaa

SEQ ID NO: 1075 - DNA, 3747 bp, Homo Sapiens
aaatttttccgtctgccctttccccctcttctcgttggcagggttgatcctcattactgtttgctcaaacgtttagaagtgaatttaggtccctccccccaacttatgattttatagccaataggtgatgaggtttatttgcatatttccagtcacataagcagccttggcgtgaaaacagtgtcagactcgattccccctcttcctcctcctcaagggaaagctgcccacttctagctgccctgccatcccctttaaagggcgacttgctcagcgccaaaccgcggctccagccctctccagcctccggctcagccggctcatcagtcggtccgcgccttgcagctcctccagagggacgcgccccgagatggagagcaaagccctgctcgtgctgactctggccgtgtggctccagagtctgaccgcctcccgcggaggggtggccgccgccgaccaaagaagagattttatcgacatcgaaagtaaatttgccctaaggacccctgaagacacagctgaggacacttgccacctcattcccggagtagcagagtccgtggctacctgtcatttcaatcacagcagcaaaaccttcatggtgatccatggctggacggtaacaggaatgtatgagagttgggtgccaaaacttgtggccgccctgtacaagagagaaccagactccaatgtcattgtggtggactggctgtcacgggctcaggagcattacccagtgtccgcgggctacaccaaactggtgggacaggatgtggcccggtttatcaactggatggaggaggagtttaactaccctctggacaatgtccatctcttgggatacagccttggagcccatgctgctggcattgcaggaagtctgaccaataagaaagtcaacagaattactggcctcgatccagctggacctaactttgagtatgcagaagccccgagtcgtctttctcctgatgatgcagattttgtagacgtcttacacacattcaccagagggtcccctggtcgaagcattggaatccagaaaccagttgggcatgttgacatttacccgaatggaggtacttttcagccaggatgtaacattggagaagctatccgcgtgattgcagagagaggacttggagatgtggaccagctagtgaagtgctcccacgagcgctccattcatctcttcatcgactctctgttgaatgaagaaaatccaagtaaggcctacaggtgcagttccaaggaagcctttgagaaagggctctgcttgagttgtagaaagaaccgctgcaacaatctgggctatgagatcaataaagtcagagccaaaagaagcagcaaaatgtacctgaagactcgttctcagatgccctacaaagtcttccattaccaagtaaagattcatttttctgggactgagagtgaaacccataccaatcaggcctttgagatttctctgtatggcaccgtggccgagagtgagaacatcccattcactctgcctgaagtttccacaaataagacctactccttcctaatttacacagaggtagatattggagaactactcatgttgaagctcaaatggaagagtgattcatactttagctggtcagactggtggagcagtcccggcttcgccattcagaagatcagagtaaaagcaggagagactcagaaaaaggtgatcttctgttctagggagaaagtgtctcatttgcagaaaggaaaggcacctgcggtatttgtgaaatgccatgacaagtctctgaataagaagtcaggctgaaactgggcgaatctacagaacaaagaacggcatgtgaattctgtgaagaatgaagtggaggaagtaacttttacaaaacatacccagtgtttggggtgtttcaaaagtggattttcctgaatattaatcccagccctacccttgttagttattttaggagacagtctcaagcactaaaaagtggctaattcaatttatggggtatagtggccaaatagcacatcctccaacgttaaaagacagtggatcatgaaaagtgctgttttgtcctttgagaaagaaataattgtttgagcgcagagtaaaataaggctccttcatgtggcgtattgggccatagcctataattggttagaacctcctattttaattggaattctggatctttcggactgaggccttctcaaactttactctaagtctccaagaatacagaaaatgcttttccgcggcacgaatcagactcatctacacagcagtatgaatgatgttttagaatgattccctcttgctattggaatgtggtccagacgtcaaccaggaacatgtaacttggagagggacgaagaaagggtctgataaacacagaggttttaaacagtccctaccattggcctgcatcatgacaaagttacaaattcaaggagatataaaatctagatcaattaattcttaataggctttatcgtttattgcttaatccctctctcccccttcttttttgtctcaagattatattataataatgttctctgggtaggtgttgaaaatgagcctgtaatcctcagctgacacataatttgaatggtgcagaaaaaaaaaaagaaaccgtaattttattattagattctccaaatgattttcatcaatttaaaatcattcaatatctgacagttactcttcagttttaggcttaccttggtcatgcttcagttgtacttccagtgcgtctcttttgttcctggctttgacatgaaaagataggtttgagttcaaattttgcattgtgtgagcttctacagattttagacaaggaccgtttttactaagtaaaagggtggagaggttcctggggtggattcctaagcagtgcttgtaaaccatcgcgtgcaatgagccagatggagtaccatgagggttgctatttgttgtttttaacaactaatcaagagtgagtgaacaactatttataaactagatctcctatttttcagaatgctcttctacgtataaatatgaaatgataaagatgtcaaatatctcagaggctatagctgggaacccgactgtgaaagtatgtgatatctgaacacatactagaaagctctgcatgtgtgttgtccttcagcataattcggaagggaaaacagtcgatcaagggatgtattggaacatgtcggagtagaaattgttcctgatgtgccagaacttcgaccctttctctgagagagatgatcgtgcctataaatagtaggaccaatgttgtgattaacatcatcaggcttggaatgaattctctctaaaaataaaatgatgtatgatttgttgttggcatcccctttattaattcattaaatttctggatttgggttgtgacccagggtgcattaacttaaaagattcactaaagcagcacatagcactgggaactctggctccgaaaaactttgttatatatatcaaggatgttctggctttacattttatttattagctgtaaatacatgtgtggatgtgtaaatggagcttgtacatattggaaaggtcattgtggctatctgcatttataaatgtgtggtgctaactgtatgtgtctttatcagtgatggtctcacagagccaactcactcttatgaaatgggctttaacaaaacaagaaagaaacgtacttaactgtgtgaagaaatggaatcagcttttaataaaattgacaacattttattaccaca

SEQ ID NO: 1076 - protein, 475 aa, Homo Sapiens
MESKALLVLTLAVWLQSLTASRGGVAAADQRRDFIDIESKFALRTPEDTAEDTCHLIPGVAESVATCHFNHSSKTFMVIHGWTVTGMYESWVPKLVAALYKREPDSNVIVVDWLSRAQEHYPVSAGYTKLVGQDVARFINWMEEEFNYPLDNVHLLGYSLGAHAAGIAGSLTNKKVNRITGLDPAGPNFEYAEAPSRLSPDDADFVDVLHTFTRGSPGRSIGIQKPVGHVDIYPNGGTFQPGCNIGEAIRVIAERGLGDVDQLVKCSHERSIHLFIDSLLNEENPSKAYRCSSKEAFEKGLCLSCRKNRCNNLGYEINKVRAKRSSKMYLKTRSQMPYKVFHYQVKIHFSGTESETHTNQAFEISLYGTVAESENIPFTLPEVSTNKTYSFLIYTEVDIGELLMLKLKWKSDSYFSWSDWWSSPGFAIQKIRVKAGETQKKVIFCSREKVSHLQKGKAPAVFVKCHDKSLNKKSG

SEQ ID NO: 1077 - DNA, 2486 bp, Homo Sapiens
gctgtggtaagtgcatcctccttcagtctcagttctgaaaatagatcatcatggtggcaccaaagagtcacacagatgactgggctcctgggcctttctccagtaagccacagaggagtcagctgcaaatattctcttctgttctacagacctctctcctcttcctgctcatgggactaagagcctctggaaaggactcagccccaacagtggtgtcagggatcctagggggttccgtgactctccccctaaacatctcagtagacacagagattgagaacgtcatctggattggtcccaaaaatgctcttgctttcgcacgtcccaaagaaaatgtaaccattatggtcaaaagctacctgggccgactagacatcaccaagtggagttactccctgtgcatcagcaatctgactctgaatgatgcaggatcctacaaagcccagataaaccaaaggaattttgaagtcaccactgaggaggaattcaccctgttcgtctatgagcagctgcaggagccccaagtcaccatgaagtctgtgaaggtgtctgagaacttctcctgtaacatcactctaatgtgctccgtgaagggggcagagaaaagtgttctgtacagctggaccccaagggaaccccatgcttctgagtccaatggaggctccattcttaccgtctcccgaacaccatgtgacccagacctgccatacatctgcacagcccagaaccccgtcagccagagaagctccctccctgtccatgttgggcagttctgtacagatccaggagcctccagaggaggaacaacgggggagactgtggtaggggtcctgggagagccagtcaccctgccacttgcactcccagcctgccgggacacagagaaggttgtctggttgtttaacacatccatcattagcaaagagagggaagaagcagcaacggcagatccactcattaaatccagggatccttacaagaacagggtgtgggtctccagccaggactgctccctgaagatcagccagctgaagatagaggacgccggcccctaccatgcctacgtgtgctcagaggcctccagcgtcaccagcatgacacatgtcaccctgctcatctaccgcaggctgaggaagcccaaaatcacgtggagcctcaggcacagtgaggatggcatctgcaggatcagcctgacctgctccgtggaggacgggggaaacactgtcatgtacacatggaccccgctgcagaaggaagctgttgtgtcccaaggggaatcacacctcaatgtctcatggagaagcagtgaaaatcaccccaacctcacatgcacagccagcaaccctgtcagcaggagttcccaccagtttctttctgagaacatctgttcaggacctgagagaaacacaaagctttggattgggttgttcctgatggtttgccttctgtgcgttgggatcttcagctggtgcatttggaagcgaaaaggacggtgttcagtcccagccttctgttccagccaagctgaggccccagcggatacaccagaacccacagctggccacacgctatactctgtgctctcccaaggatatgagaagctggacactcccctcaggcctgccaggcaacagcctacacccacctcagacagcagctctgacagcaacctcacaactgaggaggatgaggacaggcctgaggtgcacaagcccatcagtggaagatatgaggtatttgaccaggtcactcaggagggcgctggacatgacccagcccctgagggccaagcagactatgatcccgtcactccatatgtcacggaagttgagtctgtggttggagagaacaccatgtatgcacaagtgttcaacttacagggaaagaccccagtttctcagaaggaagagagctcagccacaatctactgctccatacggaaacctcaggtggtgccaccaccacaacagaatgatcttgagattcctgaaagtcctacctatgaaaatttcacctgaaaggaaaagcagctgctgcctctctcctgggaccgtggggttggaaagtcagctggacctcatggggcctggggctcacagacagaagcacctcagaatttccttcagtgcctcagagatgcctggatgtggcccctccccctccttctcacccttaaggactcccaaacccattaatagttcagacacaggctccttcttggagcctatgggcttcagatgtctttgccccatttgtcacctcgcacacttatagcgtttcctcctcgaaattctaccaagactggtcaaatgttgctgaggggcctggaccagctgtcctttacaccaccttctcaacactgctgaaaagaacccaagagaattgtcacacatgacacaagatgtacataatatcatgctcactgcagtgttatttaaaataaaaggcaggaaataaaaaaaaaaaaaaaaaaaaaaaaaaaaaaa

SEQ ID NO: 1078 - protein, 655 aa, Homo Sapiens
MVAPKSHTDDWAPGPFSSKPQRSQLQIFSSVLQTSLLFLLMGLRASGKDSAPTVVSGILGGSVTLPLNISVDTEIENVIWIGPKNALAFARPKENVTIMVKSYLGRLDITKWSYSLCISNLTLNDAGSYKAQINQRNFEVTTEEEFTLFVYEQLQEPQVTMKSVKVSENFSCNITLMCSVKGAEKSVLYSWTPREPHASESNGGSILTVSRTPCDPDLPYICTAQNPVSQRSSLPVHVGQFCTDPGASRGGTTGETVVGVLGEPVTLPLALPACRDTEKVVWLFNTSIISKEREEAATADPLIKSRDPYKNRVWVSSQDCSLKISQLKIEDAGPYHAYVCSEASSVTSMTHVTLLIYRRLRKPKITWSLRHSEDGICRISLTCSVEDGGNTVMYTWTPLQKEAVVSQGESHLNVSWRSSENHPNLTCTASNPVSRSSHQFLSENICSGPERNTKLWIGLFLMVCLLCVGIFSWCIWKRKGRCSVPAFCSSQAEAPADTPEPTAGHTLYSVLSQGYEKLDTPLRPARQQPTPTSDSSSDSNLTTEEDEDRPEVHKPISGRYEVFDQVTQEGAGHDPAPEGQADYDPVTPYVTEVESVVGENTMYAQVFNLQGKTPVSQKEESSATIYCSIRKPQVVPPPQQNDLEIPESPTYENFT

SEQ ID NO: 1079 - DNA, 6887 bp, Homo Sapiens
gaggctttaaaatcttttttcatcttctagctgtagctcgggctgcttgtcggcttggcctccccctcccccctttgctctctgcctcgtctttccccaggacttcgctattttgcttttttaaaaaaaggcaagaaagaactaaactcccccctccctctcctccagtcgggctgcacctctgccttgcactttgcacagaggtagagagcgcgcgagggagagagaggaaagaaaaaaaataataaagagagccaagcagaagaggaggcgagaagcatgaagtgttaactcccccgtgccaaggcccgcgccgcccggacagacgcccgccgcgcctccagccccgagcggacgccgcgcgcgccctgcctgcagcccgggccggcgaggcgagcccttccttatgcaaagcgcgcagcggagcggcgagcgggggacgccgcgcaccgggccgggctcctccagcttcgccgccgcagccaccaccgccgccaccgcagctcgcggaggatcttcccgagcctgaagccgccggctcggcgcgcaaggaggcgagcgagcaaggaggggccggggcgagcgagggagcacattggcgtgagcaggggggagggagggcgggcgcggggggcgcgggcagggcgggggggtgtgtgtgtgagcgcgctcggaggtttcgggccagccaccgccgcgcaagctagaagcgccccagcccggcaagctggctcacccgctggccacccagcacagcccgctggcccctctcctgcagcccatctggcggagcggcggcggcggcggcggcggcggcaggagaatggcatcagaactggcaatgagcaactccgacctgcccaccagtcccctggccatggaatatgttaatgacttcgatctgatgaagtttgaagtgaaaaaggaaccggtggagaccgaccgcatcatcagccagtgcggccgtctcatcgccgggggctcgctgtcctccacccccatgagcacgccgtgcagctcggtgcccccttcccccagcttctcggcgcccagcccgggctcgggcagcgagcagaaggcgcacctggaagactactactggatgaccggctacccgcagcagctgaaccccgaggcgctgggcttcagccccgaggacgcggtcgaggcgctcatcagcaacagccaccagctccagggcggcttcgatggctacgcgcgcggggcgcagcagctggccgcggcggccggggccggtgccggcgcctccttgggcggcagcggcgaggagatgggccccgccgccgccgtggtgtccgccgtgatcgccgcggccgccgcgcagagcggcgcgggcccgcactaccaccaccaccaccaccacgccgccggccaccaccaccacccgacggccggcgcgcccggcgccgcgggcagcgcggccgcctcggccggtggcgctgggggcgcgggcggcggtggcccggccagcgctgggggcggcggcggcggcggcggcggcggaggcggcgggggcgcggcgggggcggggggcgccctgcacccgcaccacgccgccggcggcctgcacttcgacgaccgcttctccgacgagcagctggtgaccatgtctgtgcgcgagctgaaccggcagctgcgcggggtcagcaaggaggaggtgatccggctgaagcagaagaggcggaccctgaaaaaccgcggctatgcccagtcctgccgcttcaagagggtgcagcagagacacgtcctggagtcggagaagaaccagctgctgcagcaagtcgaccacctcaagcaggagatctccaggctggtgcgcgagagggacgcgtacaaggagaaatacgagaagttggtgagcagcggcttccgagaaaacggctcgagcagcgacaacccgtcctctcccgagtttttcatgtgagtctgacacgcgattccagctagccaccctgataagtgctccgcgggggtccggctcgggtgtgggcttgctagttctagagccatgctcgccaccacctcaccacccccacccccaccgagtttggcccccttggccccctacacacacacaaacccgcacgcacacaccacacacacacacacacacacacacacaccccacaccctgctcgagtttgtggtggtggtggctgttttaaactggggagggaatgggtgtctggctcatggattgccaatctgaaattctccataacttgctagcttgttttttttttttttttacacccccccgccccacccccggacttgcacaatgttcaatgatctcagcagagttcttcatgtgaaacgttgatcacctttgaagcctgcatcattcacatattttttcttcttcttccccttcagttcatgaactggtgttcattttctgtgtgtgtgtgtgttttattttgtttggatttttttttttaattttacttttagagcttgctgtgttgcccaccttttttccaacctccaccctcactccttctcaacccatctcttccgagatgaaagaaaaaaaaaagcaaagtttttttttcttctcctgagttcttcatgtgagattgagcttgcaaaggaaaaaaaaatgtgaaatgttatagacttgcagcgtgccgagttccatcgggttttttttttagcattgttatgctaaaatagagaaaaaaatcctcatgaaccttccacaatcaagcctgcatcaaccttctgggtgtgacttgtgagttttggccttgtgatgccaaatctgagagtttagtctgccattaaaaaaactcattctcatctcatgcattattatgcttgctactttgtcttagcaacaatgaactataactgtttcaaagactttatggaaaagagacattatattaataaaaaaaaaaagcctgcatgctggacatgtatggtataattattttttcctttttttttccttttggcttggaaatggacgttcgaagacttatagcatggcattcatacttttgttttattgcctcatgacttttttgagtttagaacaaaacagtgcaaccgtagagccttcttcccatgaaattttgcatctgctccaaaactgctttgagttactcagaacttcaacctcccaatgcactgaaggcattccttgtcaaagataccagaatgggttacacatttaacctggcaaacattgaagaactcttaatgttttctttttaataagaatgacgccccactttggggactaaaattgtgctattgccgagaagcagtctaaaatttattttttaaaaagagaaactgccccattatttttggtttgttttatttttattttatattttttggcttttggtcattgtcaaatgtggaatgctctgggtttctagtatataatttaattctagtttttataatctgttagcccagttaaaatgtatgctacagataaaggaatgttatagataaatttgaaagagttaggtctgtttagctgtagattttttaaacgattgatgcactaaattgtttactattgtgatgttaaggggggtagagtttgcaaggggactgtttaaaaaaagtagcttatacagcatgtgcttgcaacttaaatataagttgggtatgtgtagtctttgctataccactgactgtattgaaaaccaaagtattaagaggggaaacgcccctgtttatatctgtaggggtattttacattcaaaaatgtatgtttttttttcttttcaaaattaaagtatttgggactgaattgcactaagatataacctgcaagcatataatacaaaaaaaaattgcaaaactgtttagaacgctaataaaatttatgcagttataaaaatggcattactgcacagttttaagatgatgcagatttttttacagttgtattgtggtgcagaactggattttctgtaacttaaaaaaaaatccacagttttaaaggcaataatcagtaaatgttattttcagggactgacatcctgtctttaaaaagaaatgaaaagtaaatcttaccacaataaatataaaaaaatcttgtcagttacttttcttttacatattttgctgtgcaaaattgttttatatcttgagttactaactaaccacgcgtgttgttcctatgtgcttttctttcattttcaattctggttatatcaagaaaagaataatctacaataataaacggcatttttttttgattctgtactcagtttcttagtgtacagtttaactgggcccaacaacctcgttaaaagtgtaaaatgcatccttttctccagtggaaggattcctggaggaatagggagacagtaattcagggtgaaattataggctgttttttgaagtgaggaggctggccccatatactgattagcaatatttaatatagatgtaaattatgacctcatttttttctccccaaagttttcagttttcaaatgagttgagccataattgcccttggtaggaaaaacaaaacaaaacagtggaactaggcttcctgagcatggccctacacttctgatcaggagcaaagccatccatagacagaggagccggacaaatatggcgcatcagaggtggcttgcgcacatatgcattgaacggtaaagagaaacagcgcttgccttttcactaaagttgactatttttccttcttctcttacacaccgagattttcttgttagcaaggcctgacaagatttaacataaacatgacaaatcatagttgtttgttttgttttgcttttctctttaacactgaagatcatttgtcttaaataggaaaaagaaaatccactccttacttccatatttccaagtacatatctggtttaaactatgttatcaaatcatatttcaccgtgaatattcagtggagaacttctctacctggatgagctagtaatgatttcagatcatgctatccccagaaataaaagcaaaaaataatacctgtgtggaatataggctgtgctttgatttactggtatttaccccaaaataggctgtgtatgggggctgacttaaagatcccttggaaagactcaaaactaccttcactagtaggactcctaagcgctgacctatttttaaatgacacaaattcatgaaactaatgttacaaattcatgcagtttgcactcttagtcatcttcccctagcacaccaatagaatgttagacaaagccagcactgttttgaaaatacagccaaacacgatgacttttgttttgttttctgccgttcttaaaagaaaaaaagataatattgcaactctgactgaaagacttatttttaagaaaacaggttgtgtttggtgctgctaagttctggccagtttatcatctggccttcctgcctattttttacaaaacacgaagacagtgtgtaacctcgacattttgaccttcctttatgtgctagtttagacaggctcctgaatccacacttaattttgcttaacaaaagtcttaatagtaaacctcccctcatgagcttgaagtcaagtgttcttgacttcagatatttctttcctttttttttttttttcctcatcacaactaagagatacacaaactctgaagaagcagaaatggagagaatgcttttaacaaaaaagcatctgatgaaagattttaggcaaacattctcaaaataagagtgatattctggatgtagttattgcagttatctcatgacaaatgaggcctggattggaaggaaaatatagttgtgtagaattaagcattttgataggaatctacaaggtagttgaatataataagcaggtttgggcccccaaactttagaaaatcaaatgcaaaggtgctggcaaaaatgaggtttgagtggctggctgtaagagaaggttaactcctagtaaaaggcatttttagaaataacaattactgaaaactttgaagtatagtgggagtagcaaacaaatacatgttttttttttcttacaaagaactcctaaatcctgagtaagtgccattcattacaataagtctctaaatttaaaaaaaaaaaaatcatatgaggaaatctagctttcccctttacgctgcgtttgatctttgtctaaatagtgttaaaattcctttcattccaattacagaactgagcccactcgcaagttggagccatcagtgggatacgccacattttggaagccccagcatcgtgtacttaccagtgtgttcacaaaatgaaatttgtgtgagagctgtacattaaaaaaaatcatcattattattattatttgcagtcatggagaaccacctacccctgacttctgtttagtctcctttttaaataaaaattactgtgttagagaagaaggctattaaatgtagtagttaactatgcctcttgtctgggggtttcatagagaccggtaggaaagcgcactcctgcttttcgatttatggtgtgtgcaagtaaacaggtgcattgctttcaacctgccatactagttttaaaaattcactgaaattacaaagatacatatatatgcatatatataatggaaagtttcccggaatgcaacaattagcattttaaaatcatatataggcatgcacattctaaatagtactttttcatgcttcattgtttctctggcagataattttactaagaagaaaaatagatattcgactccccttccctaaacaaatccacgggcagaggctccagcggagccgagccccctggttttctcgtaggccctagacggtgttgcatttatcagtgatgtcaaacgtgctcatttgtcagacatagctgtaaatgaaaacaatgtgtggcaaaatacaaagttaaaaaaaaaa

SEQ ID NO: 1080 - protein, 373 aa, Homo Sapiens
MASELAMSNSDLPTSPLAMEYVNDFDLMKFEVKKEPVETDRIISQCGRLIAGGSLSSTPMSTPCSSVPPSPSFSAPSPGSGSEQKAHLEDYYWMTGYPQQLNPEALGFSPEDAVEALISNSHQLQGGFDGYARGAQQLAAAAGAGAGASLGGSGEEMGPAAAVVSAVIAAAAAQSGAGPHYHHHHHHAAGHHHHPTAGAPGAAGSAAASAGGAGGAGGGGPASAGGGGGGGGGGGGGGAAGAGGALHPHHAAGGLHFDDRFSDEQLVTMSVRELNRQLRGVSKEEVIRLKQKRRTLKNRGYAQSCRFKRVQQRHVLESEKNQLLQQVDHLKQEISRLVRERDAYKEKYEKLVSSGFRENGSSSDNPSSPEFFM

SEQ ID NO: 1081 - DNA, 2163 bp, Homo Sapiens
gggccggcggcggcggcggcgcgcggaggagaccgcagtgcggccggcgctaggacccgcgggggcctcccaggccgcggcgcctcccgctttcccccactccccgacccttcttcgcccccaaaatgaggaaacggagcaactcgctccaagttgtgcagccgggaccgcctcggggtgtgcagccggctcgcggaggccctcctgggggcgggcgcggggcgcggctcgggggcgccccctgagcagaaaacaggaagaaccaggctcggtccagtggcacccagctccctacctcctgtgccagccgactggcctgtggcaggccattcccagcgtccccgactgtgaccacttgctcagtgtgcctctcacctgcctcagtttccctctgggggcgatggcggggcgaggctctctggtttcctggcgggcatttcacggctgtgattctgctgaggaacttccccgggtgagcccccgcttcctccgagcctggcacccccctcccgtctcagccaggatgccaacgaggcgctgggccccgggcacccagtgtatcaccaaatgcgagcacacccgccccaagccaggggagctggccttccgcaagggcgacgtggtcaccatcctggaggcctgcgagaacaagagctggtaccgcgtcaagcaccacaccagtggacaggaggggctgctggcagctggggcgctgcgggagcgggaggccctctccgcagaccccaagctcagcctcatgccgtggttccacgggaagatctcgggccaggaggctgtccagcagctgcagcctcccgaggatgggctgttcctggtgcgggagtccgcgcgccaccccggcgactacgtcctgtgcgtgagctttggccgcgacgtcatccactaccgcgtgctgcaccgcgacggccacctcacaatcgatgaggccgtgttcttctgcaacctcatggacatggtggagcattacagcaaggacaagggcgctatctgcaccaagctggtgagaccaaagcggaaacacgggaccaagtcggccgaggaggagctggccagggcgggctggttactgaacctgcagcatttgacattgggagcacagatcggagagggagagtttggagctgtcctgcagggtgagtacctggggcaaaaggtggccgtgaagaatatcaagtgtgatgtgacagcccaggccttcctggacgagacggccgtcatgacgaagatgcaacacgagaacctggtgcgtctcctgggcgtgatcctgcaccaggggctgtacattgtcatggagcacgtgagcaagggcaacctggtgaactttctgcggacccggggtcgagccctcgtgaacaccgctcagctcctgcagttttctctgcacgtggccgagggcatggagtacctggagagcaagaagcttgtgcaccgcgacctggccgcccgcaacatcctggtctcagaggacctggtggccaaggtcagcgactttggcctggccaaagccgagcggaaggggctagactcaagccggctgcccgtcaagtggacggcgcccgaggctctcaaacacgggaagttcaccagcaagtcggatgtctggagttttggggtgctgctctgggaggtcttctcatatggacgggctccgtaccctaaaatgtcactgaaagaggtgtcggaggccgtggagaaggggtaccgcatggaaccccccgagggctgtccaggccccgtgcacgtcctcatgagcagctgctgggaggcagagcccgcccgccggccacccttccgcaaactggccgagaagctggcccgggagctacgcagtgcaggtgccccagcctccgtctcagggcaggacgccgacggctccacctcgccccgaagccaggagccctgaccccacccggtggggcccttggccccagaggaccgagagagtggagagtgcggcgtgggggcactgaccaggcccaaggagggtccaggcgggcaagtcatcctcctggtgcccacagcaggggctggcccacgtagggggctctgggcggcccgtggacaccccagacctgcgaaggatgatcgcccgataaagacggattctaaggactctaaaaaaaaaaaaaaaaaaaaaaaaaa

SEQ ID NO: 1082 - protein, 507 aa, Homo Sapiens
MAGRGSLVSWRAFHGCDSAEELPRVSPRFLRAWHPPPVSARMPTRRWAPGTQCITKCEHTRPKPGELAFRKGDVVTILEACENKSWYRVKHHTSGQEGLLAAGALREREALSADPKLSLMPWFHGKISGQEAVQQLQPPEDGLFLVRESARHPGDYVLCVSFGRDVIHYRVLHRDGHLTIDEAVFFCNLMDMVEHYSKDKGAICTKLVRPKRKHGTKSAEEELARAGWLLNLQHLTLGAQIGEGEFGAVLQGEYLGQKVAVKNIKCDVTAQAFLDETAVMTKMQHENLVRLLGVILHQGLYIVMEHVSKGNLVNFLRTRGRALVNTAQLLQFSLHVAEGMEYLESKKLVHRDLAARNILVSEDLVAKVSDFGLAKAERKGLDSSRLPVKWTAPEALKHGKFTSKSDVWSFGVLLWEVFSYGRAPYPKMSLKEVSEAVEKGYRMEPPEGCPGPVHVLMSSCWEAEPARRPPFRKLAEKLARELRSAGAPASVSGQDADGSTSPRSQEP

SEQ ID NO: 1083 - DNA, 1814 bp, Homo Sapiens
attctcagcacagcctttaaggttccaaacatctgctagaagaggaatgcagatttaaactgagtgaggtgtggagtgggggaagttgattgggtctagaccaaagaactttgaggaacttgcccagagccctgcatgcatcagacctacagcagacattgcaggcctgaagaaaggtggtcacaagaggggtggaacattcctgcaaatggtttcaatatatgcagatgtctcaatataggaatgaaattacgtctttggaacaacttaaataagtcaaatatacttggagctttaaaaattaaaaggagagagattcgagcaccttttctgctgccatgacaaccatgcaaggaatggaacaggccatgccaggggctggccctggtgtgccccagctgggaaacatggctgtcatacattcacatctgtggaaaggattgcaagagaagttcttgaagggagaacccaaagtccttggggttgtgcagattctgactgccctgatgagccttagcatgggaataacaatgatgtgtatggcatctaatacttatggaagtaaccctatttccgtgtatatcgggtacacaatttgggggtcagtaatgtttattatttcaggatccttgtcaattgcagcaggaattagaactacaaaaggcctggtccgaggtagtctaggaatgaatatcaccagctctgtactggctgcatcagggatcttaatcaacacatttagcttggcgttttattcattccatcacccttactgtaactactatggcaactcaaataattgtcatgggactatgtccatcttaatgggtctggatggcatggtgctcctcttaagtgtgctggaattctgcattgctgtgtccctctctgcctttggatgtaaagtgctctgttgtacccctggtggggttgtgttaattctgccatcacattctcacatggcagaaacagcatctcccacaccacttaatgaggtttgaggccaccaaaagatcaacagacaaatgctccagaaatctatgctgactgtgacacaagagcctcacatgagaaattaccagtatccaacttcgatactgatagacttgttgatattattattatatgtaatccaattatgaactgtgtgtgtatagagagataataaattcaaaattatgttctcatttttttccctggaactcaataactcatttcactggctctttatcgagagtactagaagttaaattaataaataatgcatttaatgaggcaacagcacttgaaagtttttcattcatcataagaactttatataaaggcattacattggcaaataaggtttggaagcagaagagcaaaaaaaagatattgttaaaatgaggcctccatgcaaaacacatacttccctcccatttatttaactttttttttctcctacctatggggaccaaagtgctttttccttcaggaagtggagatgcatggccatctccccctccctttttccttctcctgcttttctttccccatagaaagtaccttgaagtagcacagtccgtccttgcatgtgcacgagctatcatttgagtaaaagtatacatggagtaaaaatcatattaagcatcagattcaacttatattttctatttcatcttcttcctttcccttctcccaccttctactgggcataattatatcttaatcatatatggaaatgtgcaacatatggtatttgttaaatacgtttgtttttattgcagagcaaaaataaatcaaattagaagcaataaaaaaaaaaaaaaaaaaaa

SEQ ID NO: 1084 - protein, 220 aa, Homo Sapiens
MTTMQGMEQAMPGAGPGVPQLGNMAVIHSHLWKGLQEKFLKGEPKVLGVVQILTALMSLSMGITMMCMASNTYGSNPISVYIGYTIWGSVMFIISGSLSIAAGIRTTKGLVRGSLGMNITSSVLAASGILINTFSLAFYSFHHPYCNYYGNSNNCHGTMSILMGLDGMVLLLSVLEFCIAVSLSAFGCKVLCCTPGGVVLILPSHSHMAETASPTPLNEV

SEQ ID NO: 1085 - DNA, 2961 bp, Homo Sapiens
aagagatgatttctccatcctgaacgtgcagcgagcttgtcaggaagatcggaggtgccaagtagcagagaaagcatcccccagctctgacagggagacagcacatgtctaaggcccacaagccttggccctaccggaggagaagtcaattttcttctcgaaaatacctgaaaaaagaaatgaattccttccagcaacagccaccgccattcggcacagtgccaccacaaatgatgtttcctccaaactggcagggggcagagaaggacgctgctttcctcgccaaggacttcaactttctcactttgaacaatcagccaccaccaggaaacaggagccaaccaagggcaatggggcccgagaacaacctgtacagccagtacgagcagaaggtgcgcccctgcattgacctcatcgactccctgcgggctctgggtgtggagcaggacctggccctgccagccatcgccgtcatcggggaccagagctcgggcaagagctctgtgctggaggcactgtcaggagtcgcgcttcccagaggcagcggaatcgtaaccaggtgtccgctggtgctgaaactgaaaaagcagccctgtgaggcatgggccggaaggatcagctaccggaacaccgagctagagcttcaggaccctggccaggtggagaaagagatacacaaagcccagaacgtcatggccgggaatggccggggcatcagccatgagctcatcagcctggagatcacctcccctgaggttccagacctgaccatcattgaccttcccggcatcaccagggtggctgtggacaaccagccccgagacatcggactgcagatcaaggctctcatcaagaagtacatccagaggcagcagacgatcaacttggtggtggttccctgtaacgtggacattgccaccacggaggcgctgagcatggcccatgaggtggacccggaaggggacaggaccatcggtatcctgaccaaaccagatctaatggacaggggcactgagaaaagcgtcatgaatgtggtgcggaacctcacgtaccccctcaagaagggctacatgattgtgaagtgccggggccagcaggagatcacaaacaggctgagcttggcagaggcaaccaagaaagaaattacattctttcaaacacatccatatttcagagttctcctggaggaggggtcagccacggttccccgactggcagaaagacttaccactgaactcatcatgcatatccaaaaatcgctcccgttgttagaaggacaaataagggagagccaccagaaggcgaccgaggagctgcggcgttgcggggctgacatccccagccaggaggccgacaagatgttctttctaattgagaaaatcaagatgtttaatcaggacatcgaaaagttagtagaaggagaagaagttgtaagggagaatgagacccgtttatacaacaaaatcagagaggattttaaaaactgggtaggcatacttgcaactaatacccaaaaagttaaaaatattatccacgaagaagttgaaaaatatgaaaagcagtatcgaggcaaggagcttctgggatttgtcaactacaagacatttgagatcatcgtgcatcagtacatccagcagctggtggagcccgcccttagcatgctccagaaagccatggaaattatccagcaagctttcattaacgtggccaaaaaacattttggcgaatttttcaaccttaaccaaactgttcagagcacgattgaagacataaaagtgaaacacacagcaaaggcagaaaacatgatccaacttcagttcagaatggagcagatggttttttgtcaagatcagatttacagtgttgttctgaagaaagtccgagaagagatttttaaccctctggggacgccttcacagaatatgaagttgaactctcattttcccagtaatgagtcttcggtttcctcctttactgaaataggcatccacctgaatgcctacttcttggaaaccagcaaacgtctcgccaaccagatcccatttataattcagtattttatgctccgagagaatggtgactccttgcagaaagccatgatgcagatactacaggaaaaaaatcgctattcctggctgcttcaagagcagagtgagaccgctaccaagagaagaatccttaaggagagaatttaccggctcactcaggcgcgacacgcactctgtcaattctccagcaaagagatccactgaagggcggcgatgcctgtggttgttttcttgtgcgtactcattcattctaaggggagtcggtgcaggatgccgcttctgctttggggccaaactcttctgtcactatcagtgtccatctctactgtactccctcagcatcagagcatgcatcaggggtccacacaggctcagctctctccaccacccagctcttccctgaccttcacgaagggatggctctccagtccttgggtcccgtagcacacagttacagtgtcctaagatactgctatcattcttcgctaatttgtatttgtattcccttccccctacaagattatgagaccccagagggggaaggtctgggtcaaattcttcttttgtatgtccagtctcctgcacagcacctgcagcattgtaactgcttaataaatgacatctcactgaacgaatgagtgctgtgtaagtgatggagatacctgaggctattgctcaagcccaggccttggacatttagtgactgttagccggtccctttcagatccagtggccatgccccctgcttcccatggttcactgtcattgtgtttcccagcctctccactcccccgccagaaaggagcctgagtgattctcttttcttcttgtttccctgattatgatgagcttccattgttctgttaagtcttgaagaggaatttaataaagcaaagaaactttttaaaaacgt

SEQ ID NO: 1086 - protein, 715 aa, Homo Sapiens
MSKAHKPWPYRRRSQFSSRKYLKKEMNSFQQQPPPFGTVPPQMMFPPNWQGAEKDAAFLAKDFNFLTLNNQPPPGNRSQPRAMGPENNLYSQYEQKVRPCIDLIDSLRALGVEQDLALPAIAVIGDQSSGKSSVLEALSGVALPRGSGIVTRCPLVLKLKKQPCEAWAGRISYRNTELELQDPGQVEKEIHKAQNVMAGNGRGISHELISLEITSPEVPDLTIIDLPGITRVAVDNQPRDIGLQIKALIKKYIQRQQTINLVVVPCNVDIATTEALSMAHEVDPEGDRTIGILTKPDLMDRGTEKSVMNVVRNLTYPLKKGYMIVKCRGQQEITNRLSLAEATKKEITFFQTHPYFRVLLEEGSATVPRLAERLTTELIMHIQKSLPLLEGQIRESHQKATEELRRCGADIPSQEADKMFFLIEKIKMFNQDIEKLVEGEEVVRENETRLYNKIREDFKNWVGILATNTQKVKNIIHEEVEKYEKQYRGKELLGFVNYKTFEIIVHQYIQQLVEPALSMLQKAMEIIQQAFINVAKKHFGEFFNLNQTVQSTIEDIKVKHTAKAENMIQLQFRMEQMVFCQDQIYSVVLKKVREEIFNPLGTPSQNMKLNSHFPSNESSVSSFTEIGIHLNAYFLETSKRLANQIPFIIQYFMLRENGDSLQKAMMQILQEKNRYSWLLQEQSETATKRRILKERIYRLTQARHALCQFSSKEIH

SEQ ID NO: 1087 - DNA, 3760 bp, Homo Sapiens
gacggtgctgtccagggggaggcgggcggagggaaggcgctgccgctgctgccgccgcctcgcccgaagcgacacagacgctgggagcggccgaggcgagatcctatcattattttaaaattcctcctcctccacgaagtccttcctgattccttcaaagaaatatcactcctccgaattcccagagtgatttcttctgacttgagcctgcagtgtgctgtgagagatctaccactagattatctcaactttggtctcctgggaccactcgttgctgacagtcagaaattgcagggcatctgatctcctggtgttaaaatctgtcgtgataccgaggaaggccccgagatcccaggcactgagtgactgcatactctgaattcttgccgccaggatggggaaacagaacagcaagctgcgcccggaggtcatgcaggacttgctggaaagcacagactttacagagcatgagatccaggaatggtataaaggcttcttgagagactgccccagtggacatttgtcaatggaagagtttaagaaaatatatgggaactttttcccttatggggatgcttccaaatttgcagagcatgtcttccgcaccttcgatgcaaatggagatgggacaatagactttagagaattcatcatcgccttgagtgtaacttcgagggggaagctggagcagaagctgaaatgggccttcagcatgtacgacctggacggaaatggctatatcagcaaggcagagatgctagagatcgtgcaggcaatctataagatggtttcctctgtaatgaaaatgcctgaagatgagtcaaccccagagaaaagaacagaaaagatcttccgccagatggacaccaatagagacggaaaactctccctggaagagttcatccgaggagccaaaagcgacccgtccattgtgcgcctcctgcagtgcgacccgagcagtgccggccagttctgagccctgcgcccaccaatcgaattgtagagctgcttgtgttcccttttgattcttctttttaacaatttttttttttttttgccaaacaatatcaatggtgatgccgtcccctgtgcggtctgatgcgccttcctccgtgacgccttcagcttcttttgtcgtggatgcttcgtgggaatgcccagagccccagtgtgcttgtggagagcatggacagacttcgtggtgttcattgtttgatgatttttaatcgttactattatttttttttattctaatgtctctgttctaaaacgtaagactcgggggttggggcaaaagaagggaaacccatccagtcctgtgattctattgcaagcttcaaggggcttttgtttgaaagacaaaactccccacctgaatctgttgtcacacgtgccgtaggggtgatggatggcaccggatgctggattccccaagaacaagttaccctctggggtgaggctattccagcgagctgggacatttccccatgggggcccactcccctctcttccccagcaggctgtagtttctaagctgtgaacatttcaagataaattaacagaggagaggaaaaagatggctcagctattttttcacaggtttacactagttgagctaatatgcgtgtctttggaaattaaacacaaatggtaacatattccaaaaccagacccatcttgttgcctattgtgataaaataaaaagacggctgtatataacatattgggtaatgcagaccaaattaagtgttttgccttgtttaaatgaaatgcatgtttagtgagcactaatacaatcttattccagaagactgtttttagtagcttattgtgaagtaagacaactataatgaatgtctgtcttgtttggaagtcatatctgtctttgcacaaatgtaccaatcgacaagtatattttatatattccataaaaatacaaagtaaccctgactagggcccaactttaattttgaatgcatttccagagtggccatgcctagagggcagatgcagagcaggtggtagtgggacaggacaattggagcacaggaatgttaacatgtatgacaggggaccagtagggtggtttccctctcaggcccagcagcccattgacagcattagactggcggcatggtgcttttctgagcagatcaatactctgcagactcgaaaaaacatcacatacattcttggaacttcccagtggtttaatctatgtgcatggttagggagccaggtctggaatattcagtttccctgcccctgttaaagaatcagaggttgggcagtcatcaaattcatcataaagacatgggcaagtgtgtctgtggtttccaaggcccccctatggagaatccaaaagtattttccattgccgtgctctttgaatgcagacttctatttccagaagtgacagcacaagtctgagttgctgtttggtctggtgacctcagacacactaatttgaattgaaagctaagagtaaaaatttgctggttacaggcgagtcatactcttgcaagtagttagcaaagggaggcccaaattctcaaggttgttgatggggaacttgccactaagagaaggcagagaggtccctagtgggtatatttgctgccaagccacttgccaaagaagaggaaccacagaaagagagacatcatgaccaggagaaaaatgtgactagacatgctaacctccaggtttttatatatgacttgagtctgctgtaattggcagcagaaatccaaatttgtatggtagaccaaaaagaaccaaatccatagggtgaaattttgagacctagactctgtaaaaataatcctagtcttcctccaggggtcagttcctcacagtggttctgtaccaaaacttgccaaattcctccatggccaagtgttaaaatctgtgtttggaaaatagcgaattaacctaagacacagaaggcagactgggtgaggagacctagcatgccctattggcagtgctcaggagctgcatcccacttttccctgctctgaatcgaagtcctagttccttcctttgattctcctttggtaggtggaatcagttaatgttttgagaaacctgcctgggctctgcccttagtcatgacatctcgctgagccagacccactctgttccttggaacctagagctggagtgaggagtagaggtctccggctattccagaaagaaaagtgagccacatgcaggctgatgaatgccgacacttccagaatgtatagaaatagtccctgtcctggcctgccactgaccctgtctgtattttctcggaggttgtttttctccttctccttcccaggaaggtctttgtatgtcgaatccagtgcactcaagtttggccaagggactccacagcacccagaagactgcatgcctcaaggtttatgtcactcctctgctgggctgttcattgtcattgctgtgttcagggacctttggaaataaaacctgttctgtcccaaataaaaccagcctgtgatgttcaagggactggaataaagtggcttacgacctgaaggattctacagagtgctcaactgttcatacatcattcagagtgggagggagctgggggtgctgtcccatcccatctgtatgcccacggtggatttaataatatataatttataaatcatagcctatggagtggcccgtaaatcagttgactgtgtagctcttgcctggcattaaagcatgtttttggtttaacatgaaaaaaaaaaaaaaaaaa

SEQ ID NO: 1088 - protein, 193 aa, Homo Sapiens [sequence omitted]

SEQ ID NO: 1089 - DNA, 3866 bp, Homo Sapiens
cagtcgctgtttgggacgctgggtgtgcggtgttctgtctccgctcccgtttcgctgtcacagcccgttccttcccggagcccgggacaggctgggcgcgcgcccgtgtgagtgagcgggactcagggcagaagtgtcccctcactgcgtttttttttccttttatccaaagaacggggcagttagtacgcttgccttcctgtcgcccggttgggagcggggttggtgtgcggagtggttcgcctttttttctttagaacttgtgagccttttttttttttttttttttttttctttttttaggctcagtgctgtccgggctggtttgcccggtccctgactaacggctttctgccccttctctcgccacccctgcccaaggtcgcccctctgccttcgcccctgtcccgggagggtgggaagctttgaccccgccctgcccactcgcgtctccgcagccgtagccgcgcctgtcccaatatgaatagggtcaacgacccacttatttttataagagatattaagcccggactgaaaaacttaaatgtcgtctttattgtcctggagataggacgcgtgaccaaaaccaaagacggccatgaagtgagatcgtgcaaagtagcagataaaacgggcagcatcactatttccgtgtgggatgagatcggaggtcttatacagccaggggatattattcggttgaccagagggtatgcatccatgtggaaaggatgtctgacactttatactggaaggggtggtgaacttcaaaaaattggggaattttgtatggtttattcagaagtgccaaatttcagtgaacccaacccagattatcgaggacagcagaacaaaggggcacagagtgaacagaagaataattccatgaatagtaatatgggtacaggtacatttggaccagtgggaaatggtgttcacactggccctgaatcaagggaacaccagttttcacatgctggcagaagcaatggccggggacttataaatccacaactacaaggaacagctagtaatcaaacagtgatgaccacaataagtaatggcagggaccctcggagagcctttaaaagatgacctatgctaaatactcatgtgtagtttttatactacatgccctacttgaacacttattgcacttttatttattgttaactgtgaaaagtacgtcctttattgggtttccttttatattcttggtttgttaagaagaatggtttgtttttatagcaaaactgttaagctgctcgagtctcctgttgaagaatgggaacactgaaaagtaggggcatttatttttagagtaaaaagattattggatagcctttaaaaaacctgcacccatttcatgggtgagttacttaagacatcagctttatagcctctatgagtctatcttctgtataagttttgtaatatttaacataaggcttaatgggagatgttcttttgtcttgtattcagatattgccaactaaagcaataaccatcaaaaaacacaagaacttgtcaatgctagcagtaatttttgagtgtttgtggctctcggaatgattgacttcgttcagtgactactattaagattttccaaggactgactcatcccaaatttttgttgtattaccaaaaaaacagattccttatcagaatttggaatagaatgtgatctctattgcaacaagtaattttaaaagaaagctacatttattttagagtagtgctcctaacatgtattatcaactttgtggattacattggaggaaaatttaaaactggggccttgaatatttattttttgaaactaccatgttaaatactgaagtataatttgggggagttataaagttatgataaacattcatctgattattttaaacaatagttgtggtagataaacatactggaggtgagtcaaattgaattcatatagtaacatgcagtctgaagtcctagttacttaataggtactcagcctggagtgaaaatcctgggtactgactttgagaggagtgagtgtgcatgttgtcaaagtttctgaacacagttcacatagccttattagcaaaagttttaagaaatggctctatcaaagaagcaattgcagctttattcagaaatataaaagtggaatttatgtacatgtcataagtggtacccacttcccctttttactgtagggtggataactcttaggatttaactctttgaatattatctcttgaataaagcatgtgttaatgttaacaaacctacgtaatttttgccctttcaatgacttacagtggagagccagtacatcttaactactgttgtagtgatggtatcaacctcatggttacttagctctgcatttgttgctttgttttttttccacttcaaatcacaaaataagtagattttgttttctgaaaactccatagcatttgaatacaaaaagttgtgccagattgtttgccctaattcactgtgtttaacaaatatttcagtacacactatgtattaggcactgtgtggaaagtgttaaggggtagacaaaataccgaataatctccacaagtttatttgtggtctatagtacttttgtaactggggttacaaaaattatagaaatttttttcctttgttcatatgcatattcatgattataatttggctttgtttgtgattaatgttttcttaagattttcacattatagaatacctcaaaagaagttgtctaaggactgggatagagagtatgtttcataaaattgtagatgtttagaatttttaaaaaccctacaaattagtatatgattgttttatataagtaagataggagcaacactttaaattatttgtgggagaatacagcattaaaggtgattttaaaagaaaaaaatttggaattttagaaaatttaaatgctgtcaggtatggaatgctgggcttccaatcctggcctcattgtctcctcacctgtgatgttggatgagttattacacttgaaatgtctttaagccttaggttccacaagtatgaaaacaagtaagtaacagtatcctttctagacttgtttaagatttccatgtaagtaattataatgacttctgacacataataatgtcgtcttataccccaacagtaggaaaaaaatgcagaattcagtatgaaagtattgttaccctttaacacagtggtccccaacctttttggcaccagagaccagtctcctggaagacagtttttccgtgggatcgggggatggttttgggatgaaactgttccacctcaggtcatcagtcattagttagattctcataaggagcgtgcaacctcaatcccttgcatactcatttcacaatagggttcatgctcctatgagaatctaatgccaccactcatctgacaggaggtggagctcaggcagtaagtctccctcgcccgccactcacctgctgggcgttcctgttcctagcaggccagaattgatactgatctaggggttggggacccctgcttaacatgttgagattaaatggagaaagacttaagcttttacttttgtgattgacacttgcttcaataatgtaaccttgttctgtgtttttatcatttattaacaaatttcttttttcttaagggaagcctccaaaatcaaagaaaagtgagttacaatccataatgaatatttgccttaccagcctactggaacacattcatcaagaacttaagaggaagaaagttttctgccttcctccttcctagtgctctcagctatcaactttgaaataagtttaaacaacacctactgaaaacaaaaaccacttagtataaaaatatcccccaccaaaaaaaaaaaaaaaaaa

SEQ ID NO: 1090 - protein, 204 aa, Homo Sapiens
MNRVNDPLIFIRDIKPGLKNLNVVFIVLEIGRVTKTKDGHEVRSCKVADKTGSITISVWDEIGGLIQPGDIIRLTRGYASMWKGCLTLYTGRGGELQKIGEFCMVYSEVPNFSEPNPDYRGQQNKGAQSEQKNNSMNSNMGTGTFGPVGNGVHTGPESREHQFSHAGRSNGRGLINPQLQGTASNQTVMTTISNGRDPRRAFKR

SEQ ID NO: 1091 - DNA, 939 bp, Homo Sapiens
atgcccaattcaaccaccgtgatggaatttctcctcatgaggttttctgatgtgtggacactacagattttacattctgcatccttctttatgttgtatttggtaactctaatgggaaacatcctcattgtgaccgtcaccacctgtgacagcagccttcacatgcccatgtacttcttcctcaggaatctgtctatcttggatgcctgctacatttctgttacagtccctacctcatgtgtcaattccctactggacagcaccaccatttctaaggcgggatgtgtagctcaggtcttcctcgtggttttttttgtatatgtggagcttctgtttctcaccattatggctcatgaccgctatgtggctgtctgccagccacttcactaccctgtgatcgtgaactctcgaatctgcatccagatgacactggcctccctactcagtggtcttgtctatgcaggcatgcacactggcagcacattccagctgcccttctgtcggtccaacgttattcatcaattcttctgtgacatcccctctctgctgaagctctcttgctctgacaccttcagcaatgaggtcatgattgttgtctctgctctgggggtaggtggcggctgtttcatctttatcatcaggtcttacattcacatcttttcgaccgtgctcgggtttccaagaggagcagacagaacaaaggccttttccacctgcatccctcacatcctggtggtgtcagtcttcctcagttcatgctcttctgtgtacctcaggccacctgcgatacctgcagccacccaggatctgatcctttctggtttttattccataatgcctcccctctttaaccctattatttacagtcttagaaataagcaaataaaggtggccatcaagaaaatcatgaagagaattttttattcagaaaatgtgtaa

SEQ ID NO: 1092 - protein, 312 aa, Homo Sapiens
MPNSTTVMEFLLMRFSDVWTLQILHSASFFMLYLVTLMGNILIVTVTTCDSSLHMPMYFFLRNLSILDACYISVTVPTSCVNSLLDSTTISKAGCVAQVFLVVFFVYVELLFLTIMAHDRYVAVCQPLHYPVIVNSRICIQMTLASLLSGLVYAGMHTGSTFQLPFCRSNVIHQFFCDIPSLLKLSCSDTFSNEVMIVVSALGVGGGCFIFIIRSYIHIFSTVLGFPRGADRTKAFSTCIPHILVVSVFLSSCSSVYLRPPAIPAATQDLILSGFYSIMPPLFNPIIYSLRNKQIKVAIKKIMKRIFYSENV

SEQ ID NO: 1093 - DNA, 936 bp, Homo Sapiens
atgggcaaggaaaactgcaccactgtggctgagttcattctccttggactatcagatgtccctgagttgagagtctgcctcttcctgctgttccttctcatctatggagtcacgttgttagccaacctgggcatgattgcactgattcaggtcagctctcggctccacacccccatgtactttttcctcagccacttgtcctctgtagatttctgctactcctcaataattgtgccaaaaatgttggctaatatctttaacaaggacaaagccatctccttcctagggtgcatggtgcaattctacttgttttgcacttgtgtggtcactgaggtcttcctgctggccgtgatggcctatgaccgctttgtggccatctgtaaccctttgctatacacagtcaccatgtcttggaaggtgcgtgtggagctggcttcttgctgctacttctgtgggacggtgtgttctctgattcatttgtgcttagctcttaggatccccttctatagatctaatgtgattaaccactttttctgtgatctacctcctgtcttaagtcttgcttgctctgatatcactgtgaatgagacactgctgttcctggtggccactttgaatgagagtgttaccatcatgatcatcctcacctcctacctgctaattctcaccaccatcctgaagatgggctctgcagagggcaggcacaaagccttctccacctgtgcttcccacctcacagctatcactgtcttccatggaacagtcctttccatttattgcaggcccagttcaggcaatagtggagatgctgacaaagtggccaccgtgttctacacagtcgtgattcctatgctgaactctgtgatctacagcctgagaaataaagatgtgaaagaagctctcagaaaagtgatgggctccaaaattcactcctag

SEQ ID NO: 1094 - protein, 311 aa, Homo Sapiens
MGKENCTTVAEFILLGLSDVPELRVCLFLLFLLIYGVTLLANLGMIALIQVSSRLHTPMYFFLSHLSSVDFCYSSIIVPKMLANIFNKDKAISFLGCMVQFYLFCTCVVTEVFLLAVMAYDRFVAICNPLLYTVTMSWKVRVELASCCYFCGTVCSLIHLCLALRIPFYRSNVINHFFCDLPPVLSLACSDITVNETLLFLVATLNESVTIMIILTSYLLILTTILKMGSAEGRHKAFSTCASHLTAITVFHGTVLSIYCRPSSGNSGDADKVATVFYTVVIPMLNSVIYSLRNKDVKEALRKVMGSKIHS

SEQ ID NO: 1095 - DNA, 4161 bp, Homo Sapiens
gcgcgcgggcggcgtagccggcctgtctgggccgcctcgtggggagggagggggcgcccggccgcccggcggcgaccccggggcctggccgccaccatgggcttcgagctggaccgcttcgacggcgacgtggacccggacctgaagtgcgcgctgtgccacaaggtcctggaggacccgctgaccacgccgtgcggccacgtcttctgcgccggctgcgtgctgccctgggtggtgcaggagggcagctgcccggcgcgctgccgcggtcgcctgtcggccaaagagctcaaccacgtcctgccgctcaagcgccttatcctcaagctggacatcaagtgcgcgtacgcgacgcgcggctgcggccgggtggtcaagctgcagcagctgccggagcacctcgagcgctgcgacttcgcgcccgcgcgctgtcgccacgcgggttgcggccaggtgctgctgcggcgcgacgtggaggcgcacatgcgcgacgcgtgcgacgcgcggccagtgggccgctgccaggagggctgcgggctacccttgacgcacggcgagcagcgcgcgggcggccactgctgcgcgcgagcgctgcgggcgcacaacggcgcgctccaggcccgcctgggcgcgctgcacaaggcgctcaagaaggaggcgctgcgcgctgggaagcgcgagaagtcgctggtggcccagctggccgcggcgcagcttgagctgcagatgaccgcgctgcgctaccagaagaaattcaccgaatacagcgcgcgcctcgactcgctcagccgctgcgtggccgcgccgcccggcggcaagggcgaagaaaccaaaagtctgactcttgtcctgcatcgggactccggctccctgggattcaatattattggtggccggccgagtgtggataaccacgatggatcatccagtgaaggaatctttgtatccaagatagttgacagtgggcctgcagccaaggaaggaggcctgcaaattcatgacaggattattgaggtcaacggcagagacttatccagagcaactcatgaccaggctgtggaagctttcaagacagccaaggagcccatagtggtgcaggtgttgagaagaacaccaaggaccaaaatgttcacgcctccatcagagtctcagctggtggacacgggaacccaaaccgacatcacctttgaacatatcatggccctcactaagatgtcctctcccagcccacccgtgctggatccctatctcttgccagaggagcatccctcagcccatgaatactacgatccaaatgactacattggagacatccatcaggagatggacagggaggagctggagctggaggaagtggacctctacagaatgaacagccaggacaagctgggcctcactgtgtgctaccggacggacgatgaagacgacattgggatttatatcagtgagattgaccctaacagcattgcagccaaggatgggcgcatccgagaaggagaccgcattatccagattaatgggatagaggtgcagaaccgtgaagaggctgtggctcttctaaccagtgaagaaaataaaaacttttcattgctgattgcaaggcctgaactccagctggatgagggctggatggatgatgacaggaacgactttctggatgacctgcacatggacatgctggaggagcagcaccaccaggccatgcaattcacagctagcgtgctgcagcagaagaagcacgacgaagacggtgggaccacagatacagccaccatcttgtccaaccagcacgagaaggacagcggtgtggggcggaccgacgagagcacccgtaatgacgagagctcggagcaagagaacaatggcgacgacgccaccgcatcctccaacccgctggcggggcagaggaagctcacctgcagccaggacaccttgggcagcggcgacctgcccttcagcaacgagtctttcatttcggccgactgcacggacgccgactacctggggatcccggtggacgagtgcgagcgcttccgcgagctcctggagctcaagtgccaggtgaagagcgccaccccttacggcctgtactaccctagcggccccctggacgccggcaagagtgaccctgagagcgtggacaaggagctggagctgctgaacgaagagctgcgcagcatcgagctggagtgcctgagcatcgtgcgcgcccacaagatgcagcagctcaaggagcagtaccgcgagtcctggatgctgcacaacagcggcttccgcaactacaacaccagcatcgacgtgcgcagacacgagctctcagatatcaccgagctcccggagaaatccgacaaggacagctcgagcgcctacaacacaggcgagagctgccgcagcaccccgctcaccctggagatctcccccgacaactccttgaggagagcggcggagggcatcagctgcccgagcagcgaaggggctgtggggaccacggaagcctacgggccagcctccaagaatctgctctccatcacggaagatcccgaagtgggcacccctacctatagcccgtccctgaaggagctggaccccaaccagcccctggaaagcaaagagcggagagccagcgacgggagccggagccccacgcccagccagaagctgggcagcgcctacctgccctcctatcaccactccccatacaagcacgcgcacatcccggcgcacgcccagcactaccagagctacatgcagctgatccagcagaagtcggccgtggagtacgcgcaaagccagatgagcctggtgagcatgtgcaaggacctgagctctcccaccccgtcggagccgcgcatggagtggaaggtgaagatccgcagcgacgggacgcgctacatcaccaagaggcccgtgcgggaccgcctgctgcgggagcgcgccctgaagatccgggaagagcgcagcggcatgaccaccgacgacgacgcggtgagcgagatgaagatggggcgctactggagcaaggaggagaggaagcagcacctggtgaaggccaaggagcagcggcggcggcgcgagttcatgatgcagagcaggttggattgtctcaaggagcagcaagcagccgatgacaggaaggagatgaacattctcgaactgagccacaaaaagatgatgaagaagaggaataagaaaatcttcgataactggatgacgatccaagaactcttaacccacggcacaaaatccccggacggcactagagtatacaattccttcctatcggtgactactgtataattttcacttctgcattatgtacataaaggagaccactaccactggggtagaaattcctgcctcgttcaatgcggcaagtttttgtatataagataagtacggtcttcatgtttatagtccaaatttgcaaaccctacaactctgggtgtcataggtctattttaagggaagagagagaaaaacacccttactatcttggaaggcaatattaacaaacagagcttttttcaaatagcaattgtacttttctacctgtacccttttacataaagtgtttaaatttcagaaagatcttttattaagcatactttcacagaataacttgtttaaactatattcatataaaaaagttaaacacgctttttttcctgcctaaaacacaaatacaactgccagtatgtatttttaatggaaccctattttataatggtacgttactgaatgtgtttcatatgcgtgaccgttaagatattatcatttaggtgaaggtttcaactcaaaaccacccaacccggtggttaacgatttaatacatataaccaaaccggcagcgtttagagttgggatatacatttaaacattttcctggttaaggttcccaagagagtgtaaaggttttagcagaaagcaaaatatcttgcatctttatggaagtttaaagcatgtttgcaaatattgcagcccattgaaagaatttgcatgtacaggaaagttgtggatggagacggtttgtggaattttaagtgctcattgtagtaaacttttgctttgtagatttgaaggtacagacttatacaggcaagttcacaaaatcatgattagttacaaacagtaaaatgaagttaaaataaattattattttct

SEQ ID NO: 1096 - protein, 1066 aa, Homo Sapiens
MGFELDRFDGDVDPDLKCALCHKVLEDPLTTPCGHVFCAGCVLPWVVQEGSCPARCRGRLSAKELNHVLPLKRLILKLDIKCAYATRGCGRVVKLQQLPEHLERCDFAPARCRHAGCGQVLLRRDVEAHMRDACDARPVGRCQEGCGLPLTHGEQRAGGHCCARALRAHNGALQARLGALHKALKKEALRAGKREKSLVAQLAAAQLELQMTALRYQKKFTEYSARLDSLSRCVAAPPGGKGEETKSLTLVLHRDSGSLGFNIIGGRPSVDNHDGSSSEGIFVSKIVDSGPAAKEGGLQIHDRIIEVNGRDLSRATHDQAVEAFKTAKEPIVVQVLRRTPRTKMFTPPSESQLVDTGTQTDITFEHIMALTKMSSPSPPVLDPYLLPEEHPSAHEYYDPNDYIGDIHQEMDREELELEEVDLYRMNSQDKLGLTVCYRTDDEDDIGIYISEIDPNSIAAKDGRIREGDRIIQINGIEVQNREEAVALLTSEENKNFSLLIARPELQLDEGWMDDDRNDFLDDLHMDMLEEQHHQAMQFTASVLQQKKHDEDGGTTDTATILSNQHEKDSGVGRTDESTRNDESSEQENNGDDATASSNPLAGQRKLTCSQDTLGSGDLPFSNESFISADCTDADYLGIPVDECERFRELLELKCQVKSATPYGLYYPSGPLDAGKSDPESVDKELELLNEELRSIELECLSIVRAHKMQQLKEQYRESWMLHNSGFRNYNTSIDVRRHELSDITELPEKSDKDSSSAYNTGESCRSTPLTLEISPDNSLRRAAEGISCPSSEGAVGTTEAYGPASKNLLSITEDPEVGTPTYSPSLKELDPNQPLESKERRASDGSRSPTPSQKLGSAYLPSYHHSPYKHAHIPAHAQHYQSYMQLIQQKSAVEYAQSQMSLVSMCKDLSSPTPSEPRMEWKVKIRSDGTRYITKRPVRDRLLRERALKIREERSGMTTDDDAVSEMKMGRYWSKEERKQHLVKAKEQRRRREFMMQSRLDCLKEQQAADDRKEMNILELSHKKMMKKRNKKIFDNWMTIQELLTHGTKSPDGTRVYNSFLSVTTV

SEQ ID NO: 1097 - DNA, 6271 bp, Homo Sapiens
agctccccgcctgctcccggaggccgcagcctccagctccgctcgcgctctcgccgctcctgccggctcgcccggccccgcgctccgccgtctcctcgccgcccgcccctccgccagccccggggaccgcgcggccgcagcctgagccagggccccctccctcgtcaggaccggggcagcaagcaggccgggggcaggtccgggcacccaccatgcgaggcgagctctggctcctggtgctggtgctcagggaggctgcccgggcgctgagcccccagcccggagcaggtcacgatgagggcccaggctctggatgggctgccaaagggaccgtgcggggctggaaccggagagcccgagagagccctgggcatgtgtcagagccggacaggacccagctgagccaggacctgggtgggggcaccctggccatggacacgctgccagataacaggaccagggtggtggaggacaaccacagctattatgtgtcccgtctctatggccccagcgagccccacagccgggaactgtgggtagatgtggccgaggccaaccggagccaagtgaagatccacacaatactctccaacacccaccggcaggcttcgagagtggtcttgtcctttgatttccctttctacgggcatcctctgcggcagatcaccatagcaactggaggcttcatcttcatgggggacgtgatccatcggatgctcacagctactcagtatgtggcgcccctgatggccaacttcaaccctggctactccgacaactccacagttgtttactttgacaatgggacagtctttgtggttcagtgggaccacgtttatctccaaggctgggaagacaagggcagtttcaccttccaggcagctctgcaccatgacggccgcattgtctttgcctataaagagatccctatgtctgtcccggaaatcagctcctcccagcatcctgtcaaaaccggcctatcggatgccttcatgattctcaatccatccccggatgtgccagaatctcggcgaaggagcatctttgaatatcaccgcatagagctggaccccagcaaggtcaccagcatgtcggccgtggagttcaccccattgccgacctgcctgcagcataggagctgtgacgcctgcatgtcctcagacctgaccttcaactgcagctggtgccatgtcctccagagatgctccagtggctttgaccgctatcgccaggagtggatggactatggctgtgcacaggaggcagagggcaggatgtgcgaggacttccaggatgaggaccacgactcagcctcccctgacacttccttcagcccctatgatggagacctcaccactacctcctcctccctcttcatcgacagcctcaccacagaagatgacaccaagttgaatccctatgcaggaggagacggccttcagaacaacctgtcccccaagacaaagggcactcctgtgcacctgggcaccatcgtgggcatcgtgctggcagtcctcctcgtggcggccatcatcctggctggaatttacatcaatggccaccccacatccaatgctgcgctcttcttcatcgagcgtagacctcaccactggccagccatgaagtttcgcagccaccctgaccattccacctatgcggaggtggagccctcgggccatgagaaggagggcttcatggaggctgagcagtgctgagaacaccaagtctcccctttgaagactttgaggccacagaaaagacagttaaagcaaagaagagaagtgacttttcctggcctctcccagcatgccctgggctgagatgagatggtggtttatggctccagagctgctgctcgcttcgtcagcacaccccgaatattgaagagggggccaaaaaacaaccacatggattttttataggaacaacaacctaatctcatcctgttttgatgcaagggttctcttctgtgtcttgtaaccatgaaacagcagaagaactaacataactaactccatttttgtttaaggggcctttacctattcctgcacctaggctaggataactttagagcactgacataaaacgcaaaaacaggaatcatgccgtttgcaaaactaactctgggattaaaggggaagcatgtaaacagctaactgtttttgttaaagatttataggaatgaggaggtttggctattgtcacatgacagactgttagccaaggacaaagaagttctgcaaacctcccctggacccttgctggtgtccagatgtctgcggttgtcagccccttcctttcccccgacctaaacataaaagacaaggcaaagcccgcataattttaagacggttctttaggacattagtccaccatcttcttggtttgctggctctccgaaataaagtccctttccttgctccaactccttgtctctcaacgtattggctatgacgcagcaagcagaatgaatttggactcagttacaggctgtcaatggtctgctctgtagcagtctcagagcctccccgacccactacctggagatagccagatagccagatgccctgctcctggccacctttaaagcccctgcatatgacacaggttaactaaagtcaagattggggctgctgcattccaggttccctagactcacaagctggtccttggccaggtgcagtggctcacgcctgtaatcccagcactttgggaggctgaggcaggcggatcacctgaagtcagaagtttgagaccagcctggccaacataattaaaatgtctctactaaaaatacaaaaaattagctgggtgtggtgacgcttgcctgtatcccagctactcaggaagctgagacacgagaatcacttgaacctgggaggcagaggttgcagtgagctcagatagtgccactgcactccagcctgggtgacagagcgagactccgtctcaaaaaaaaaaaaagaaagcagatcctcatggctatagagttggcattttagccccagcttctgtagctctgaaagcctaaagaaggtattctctccatctgttaaacacagtatagtggctctcagcccttggggcatgttatcatgggagggaagtcaaataagaggagagaaaagaactcaagggggaaactgcatttttaggctttgctctcttaccttgccctttctactcagaaccaataacttctgcatcaaaacatgttacagcctgcatcaagggctttaccccaacctgcagcccagccttccctgggtgagcttgctatgcgcagccacatttaccatgtggggctccctattctgatggcctgttcggtgccgggtttactcactgccctgttctgatgtcagtgcctgtacatacctccaaaggcaggacttgcctgataaatatttttcctcctctgaactggattttataggcattaaagacaagtcgggtggctagagggctccttgagacatacctagcagggaactgcaggtggattctgttgagaggcaaagcacctgagtggttgggacacaggcagctggcatgggagggactttttttgagacagggtctcactgtgtcgcccagggcaaggatgcccaaagacaccaggttggagaggcacctgccaactacttgctttccctggagcctgcatgtgcctgtggggtggggaggcgtaggggtctacggctgcctgagatgggtgtgcacagtgtgtgaagtacctacctccttgccttgctggactgtcagccagtcgcagggccggccacaagacccatgtctccatctggtcatactccatagctaccaagttaacctgctctaaactttggagaactggatctgtccaataaacgcttatttggccaagcctgatggctcgtgcctgtactcccagcactttgggaggctgaggtgggagggttgcttgagcccaggggtttgagaccagcttgggcaacaacaacaaaaatgccaggtgtggtggggtgcacctgtagtcccagctactagggaggctgagccaggaggatcacttgagcccgggaggttgaggctgcagtggggggtcataatcatgccactgtactccagcctgggtgacagagtgagaccctgtctccgaaaaaaaaaaaaaaaaaaagaacggaaaaagaaatgcttacattgtcagggatcctgtagacaatcattaactctatgagatgcttggttctatttttttgggagactttgtccaagtgttttggcttaagaaatccataggcctctcttggtgacacatctctagtactttttgtcataaacaaacaggccatctgccgccaaatacatccactccccatgccactgacatcctatgggtcagccaggcttgctttgactgaggccgaggcatctggaactttctctgcctgcaggggctagcagcagaggcttcaccgcatcaccaccccttcctccactcctgacattctttcccttcagggatccaaaatggttggccgagctcccagtgggaaaacgtgtgctagagttggggagtgagatgagtggtgctgtccatggaatcaggccacagcaggaactgccccactggccatttgagacacacacaggtggtaaatgctctgctggtgggctgtgcttccctcattcagagagctctgttacagcccactgtgtcctttagaagcttgaaaggaacccaactctttgctgcactgtcctttttcttcctcaaattcagaccctccttccaccggcacccccctactccaccctcagctcttccttgcctggtttatcaagcagagctgaggccccacgtttccaactctgattgtcacttgcatcttcacaaaggataaaccacggagcaactggaaaaccatcagccaagcgttcggatgagtctggttattggtccacccccgaccagattcccttacacttaactcacttctttctttggcaatgaccctcatgacatgtataaatgggtatgactaagaagaggctgtgatctaacatttatttgctgccattttttactctggggagaagcagccccaactcatcactgggaaagaactccccctgcaaaccagctaaatttgataatttaaaccccctgcccctaaaacttctcacagagctggggagttggtggcaactttccaagtcaaggtcttgcttagaaagtccttcactacatggccaggtgcagtggctcacgcctgtagtcccaggtacttgggagcctgaggcaggaggattgcttgagctcaggagttcaaggctgcagagagctatgatcatcccactgcatttgtttaaaaataaatttttaaaatttgtgtgttttatcaggggtctcctgtacagtgtatctgtgtatgtttgtgtgtgtgtttgtatacagccttgtttaatgttttgagcaataagatatgcacacacaggtattttgttgctaaagagattggacaaggttgtagctgtgctcaggcttcagcttggtttgttaaattgagagataaacaatgacaagagctgccagccaaccacactattcaaaaagcaaagtgttcaccactaaagctaaccattcatctggttgcaggcaaggctaaggctctctctcctctagttcctggaacagactcacagattggcatgaagcactgatcaggggctgcactcagactccctggccaagcaaacctacaccagaagagtcagtgtcacagatatgatgcggccaatctctgtctccaaaaacctacctgaacttaatggtagaattcaaagatctggggactgagggcacccagccttctaaaacacaatgtattcatgtgtttagtgtaaactctctgcatggattctcagtgttaataataaaaggaagcattcttttacaactcctgctgtgtgcaaaagaaagtgcaaaggatttggagtggcattccgaagatcaccacacataccttggttctgatggctgctgaactccgacttcttcgctgagacatgactgtgggaacagcctccagctatctgctcatcagaggtgctttcctcaacctcctgcaccacctccaagagaaacagcctaaaaagaaaccccagctgtttacttatattggtctgtaaatccctggaagtaaaccccatgcatttttatctactgtctgaggacatacaataaatctgagaaagtctatgctgtcaaaaaaaaaaaaaaaaaaaa

SEQ ID NO: 1098 - protein, 500 aa, Homo Sapiens
MRGELWLLVLVLREAARALSPQPGAGHDEGPGSGWAAKGTVRGWNRRARESPGHVSEPDRTQLSQDLGGGTLAMDTLPDNRTRVVEDNHSYYVSRLYGPSEPHSRELWVDVAEANRSQVKIHTILSNTHRQASRVVLSFDFPFYGHPLRQITIATGGFIFMGDVIHRMLTATQYVAPLMANFNPGYSDNSTVVYFDNGTVFVVQWDHVYLQGWEDKGSFTFQAALHHDGRIVFAYKEIPMSVPEISSSQHPVKTGLSDAFMILNPSPDVPESRRRSIFEYHRIELDPSKVTSMSAVEFTPLPTCLQHRSCDACMSSDLTFNCSWCHVLQRCSSGFDRYRQEWMDYGCAQEAEGRMCEDFQDEDHDSASPDTSFSPYDGDLTTTSSSLFIDSLTTEDDTKLNPYAGGDGLQNNLSPKTKGTPVHLGTIVGIVLAVLLVAAIILAGIYINGHPTSNAALFFIERRPHHWPAMKFRSHPDHSTYAEVEPSGHEKEGFMEAEQC

SEQ ID NO: 1099 - DNA, 7853 bp, Homo Sapiens
gagtatcacctgatgggtgcctgactttcctggtggggtgcagggccctctcctgccctctttgtgtctgactagctacccactgtaacaaaatgttcacaccaagtgggataaagattataaagaatttcacgtcaattcagttcagctgttgctacaaaattagctatgccgagctttggacctttgaagcttttttccccccccaactttatttagaagaacaaatctaggtcccagtgccccccatgtcctccccaaacccccaccataatttaagtaatttagagttgaagggaggagaaagaaaggggagggatgaggaagaagagcccactgcagccctggcgatgggattctcggccaccccagggcccccggggaccagaggttcggtggaggaggctgcagctcctgggcccaccatgccccccagatctccacacatggttctccaagagcaggtagcctgacccctggttaagtgcagactccaggtggctcagccggcacctgatggtcagcagcacacatcagacacgcagctcaaccgtccagttcctccggatcttactgctggcacccatattgaggtggaaggaagcctttgggtggagcgatgtggaagtccttcctcatcaggagtttcacatggtacaggccccagggtcctcaaaggtgacctgcaggtctgcgagcacctccttgttgggaaagatctttaagtcatccagcaggttttgcagtcaatgtcgttacctccttgtgcaccaggccatcatggggagagcaggttcttcacattcaagtccatgactgtggctggacaagggtgagtctctgccacccacccccgtccccgcatccctgccctccctcctctaaaccacacaccccagaaacaggttctgggatttgggaatccctctaaggaatcatggacacataggttgtattgaatcatccttctgcttgtgtcaatcctctccaggtaaatcaatcctggatcaggcagcaggtgcaggctgtggaaggcttctcactctggaatgctcacagctgggccagaggaggaagccccactctctgggcatttccaggacgtaggacagagaattagaggtgctgagctccctggctggctgcctcacagagctgtgtgcccctagggaaagtgttgcacccacctccctggtctactaactgtggaggcagagaaggaaacccctgatgctcccagtggttctgtgcagctgaaggccgctgtgaggctatggggacttccagaccagggcagagcccccacattctctgcactcttgggcagggattttaaccaccagcccctgcttcctcccctgtcactgtctgggaatgtgggttctggagtcctactgcctgggtcagagtccaccccaccaggcagctctgcttggacttagttatctaagcctcggtttctttacctggataatgagcgtgataataatgacacccacctcttaaagtgagagacttgacaaagctagcgtgggtccagctcagtgcctgggcgtacagaaggcacacaacacaagagaaggctctgagtcctactgtggagattaggcctgtggcagtgtcctgtggttgccgaaagaaattaccacaaccttggtggcttaaaatgacagaaattggtactctcacagttctggaggctagaagtctgaaatcaaggaatcagccaggttggctccttctgcaggctctgaggcagaatctatcccagcctctctttggctcctgttggatcctggtggtccttgggtcctcagctttgagatgcatcactccagtctctacctctgtctttgcaaggccttcttcttatgtctttgtgtatcatttctctctctcctttcttttattaggataccagtcattggatttagggtggaccctaaatccagaatgatctcatctcaagacctttagcttaattcaatatgcaaagaccttatttccacatcaggtcatagtcacaggtacaaggggttaggacttgaacatatctttttggggggcaccattcagccccactacagcactagggttggggcacaaagctcctagggttggaagagtggcacagcagccacccacatgtgatggcaaattgttcttagacccctagaggggtcgctgatggggtcactcggtacggcggtcacatagttaaaggctagaggttttttaatggggcagacctagtggcaagccctaaggcagcgagcaagtttattttaccaaagtaaaactccatttcctcatctctaaaatgaacatgagacgccccacttcaggaattctcttgaagactaaagacaacaggtttacagtgtctagtccataataataaaaatgaaacaaaacaacaacaacaaaaataagtctaatccataaaactctcagtcagtgaaatgccctcccctgcccccactttcggtcctctctgaaatcaggaacctgatcgggccctcccattgttagaacacttcagtgccagtcacggcaggaggctggttatctgaagggccttccccagtgccaatcggttggcaaggtccagatctgcattgcagataagcgcttgattactggggacagattctatggaactgctcccttcatgagaaacaccattaacaacccaaactcacaagccccaacctttctgacacccagagagaacagccaggctttgctcttcaagccaaaacctggtatctgatgcaaaacgagtctgggatgggtttcaaagcaggagtctagattcccccaaagccctgtgaggggccacagacacagctcacacaatgaagcttgggccattcagacctgggaaaggtcaaggccaggcaggttctcatgtccttctgcaattagaaacctgcaccccagcaaagccccctggtctggtttgggtgtgtcccccagtgttcatgtgttggaaacttaattcccaatgcatcagtgttaagaggtgggaccttcaacaggtgctcaggtcatgagggatgagtagatcaatgtggttatcaaggagtgggtttgtcatcatgagtgagctgttataaaggtgagtttgggtctctcttgctctctctcaccctttctttgcccttcctcaatgggatgatgtagcaagaaggcccccactagatgtgggtcccccaactttggacttcccagcctccagaactgtaagaatacatttcttttctttataaattactcagtctgtggcattttgttacagcagcacaaaacagactaagacatccccatcccagggttggttggaaagccccagccctgtcccaccaggtcacagttctctttggtcactaagaatgctcctgatgcctgctttgtttcctgggacacggggagactttcttttcctggtccattcttacaacacagggcagggtttctatttttgttgtagaatagcctgtgcacagggcacagcattttaattcctcagctaataatttgattcctcaccaataatactgccaagcagtaagtttcttttttaatgttgtcatttgctggttttttgtcatgagacctcaaggaacacagagggacactctttttagccatctgagggctggatgaatggctttagctgccagcgcctgcccagctttgtttccactctgcccctggaagggaatcgcccagcaggcttcatctctgcctctgaccctcccactcttgttctggagcctgctctttttgggatcctcccgaaaccacaggatttttccaacgcaaagggaacctccacctgggaagcaccagaagccctttcccttcacccatcctcctggctcctccttcttccagttcctgaatccaactcttcatgaagccaggaaggtcgctgcccacctttcctgtccttccccttggcctgccccaagtgggtggagtggtgagataataactgcagcagcccagcttccaggcatggctttttaatgtttccgaggcactgagcaaagtgccctcaatgcattatcccagtcaacacttagcccattttacagaagaggaaaatgcagcccagagaggtcatagatgggttccctgggctccaaggcattgaaactccagcggggtcgatgaaagggcagggggcactggagattggtgctttgctttttagactttgatgagggttcaacaggaaatggaaaagagtggggcagaaaagcatgaccctgcaggggcttcacactgctatggcggtggggcctcagttacctatctgtccggacttctgggaaaacacctacacgggcatgggcagggggttcgagagttgtctgaggcactccaaggctggaggccctcattggtgcacaggaatcaggtcagggcatggcgaaacatatggcaccgacactgttcaccagacacacattctcctcttccaggttgaccaaattttccctgcttgcagcaacaaggagctataacaagaaagaaacacccagaccctagagccaacccatcaactatactgtgtgagcctaaatccacccctctcccgccccgccagagtagatgacaaacccccatactcctatccctctggtgtccctgtactgcccccgatggccagctgcttctcctgactgaagatgcttatctttttagtggtttggtaggactggggcttctggccatccattattctgcagaattactaaatccattttctaattcccagagagcttggcaatgatatcttattgatttgattatttccctccctgctgctgactccctctttttacaacttatttttttttaagatggggtggggggggtctcactttgtcgcccaggctggagggcagtggtgcgatcatggctcactgcagcctcgacctcctgggctcaggtgatcttcctacctcatcctctagagtagctggaactacaggcactagccaccacacctggctatttctttattttttgtagagacaagatctcactatgttgcccaggctggtctccaactcctgagctcaagcaatcctcctgcctcagccttctaaaatgctgggattacagacatgagccatcatgctggggctggctccctctttatctgtgagaacagaaagcgtacggatggattggtggttggtgccacccaaacccctgatctctccaccagctccaccttctcagttttcttcagtgcaggattcctggggtggaaaccagccagcgtgtctggatgggcctgcacgccccctccaagtccattcattgaactaacttctggtctgggctggtcagtgcgattctgagagtcctgctctcaaagacacagaagaaggagcagagccagtcctcacccttttcccagggaattttggggcaacttaatggcagtggatatttttagggagggaatgtcaataaatattagtaattatgattgatattaattaggattgagttgtgggactatcaaaatgacttggtggtgatttccctcgtggcaatagaaatgcctttagtggaagtgcatttctcttccactctggaaacctcagagtcaaaatcccagcaagggaaaggaatttcacagtggcatgcctgggcaaactgatgggcgaaaataccatcagcgccatgtgcttagaatgaaagccctcacccacagtcgtctgggggttaggatccagccctggcttaacaatgtgtaacttctcggtgattgtggaactcggagaaattacacccgtcatttgatatcaattactattccagccttctcagttgaactaaactcctcagaacagaagatctccaggtctgtggtagtttctgctactttaggctacttttttgggtggggcaggggggcaagatgaggacattcacagcagccactgttcttctttgttccagtgatagcgacactgcagccatctccagggaaccagtggcctgtttgctgtgtgtgcttccacactggcctcccacgtgccagctggtgttacctgcgtcgctcactcctgctgctggagtggctgcgtcagcagggggagctgagagcagtaagtggctggaacagcccagggaaggaggagatccctgggaagcaagatcggagttcacgtggaggacgctggaaccacagaagcatgtgtgtttgtggcaacctcacggctccactgctggagttaatgatccatgagcaaaacactgagcccatccacactggccgctggcggatggacaccgccatgctagatctgtgcggtcgcccggggagcaccgggccattcctaacaagcgtgcagtcgagatgcagacaggaaggccaagggagggagaagggggcttcagcacacggcagcgcgtggcccctgggcccgaccccttctccggcagcgcagcagtcctccaccttgtcttgctaattcccagccactgccccgcctcaggtcatcctcctggcggtcagagtgacctactcgactggcacttctggtgtgtaggaatctctggtagatcaagttaaaaggcagattttgaatccctggatctggggtggggcctgaaattctgcatttctgaggggctcccaggtaaggccaaggctgctggccggctgaggagttaacagtgtgtgctctggagtcacgtggattcctgcttgccagtagcgcgccttggaaagtcaccccgcctggctctgccatttccttctctgtacatacagtgttgtctgcggtgagggtgacacagctgaataggcacaatgggccggaccagtgccgggcacgcggtgcatgcgaagtcagtagttataactgctcgtctgtgctgcaaccctgcagtgcacccttcgcctgcacaataaaatctaccatcagccaccaccgtgccctgccctcccgtgcaccagtcaccctgagcattgtacgggagttctggaaaggagcagagttttctcaaatgcagagttgcccttgattttgaatgccgttctctccctgatccccccagcaaagtcctcctccttcttttgggctctgagacctccagagccacctccaggaagctgagaagacaggaagtgtttttactcttttccattcccagttttgtacatcacctgacgtatactaggttttaataaatggtgaaagaatgaatgaaacaacaaatactttaggtctttcttctacaacttctttggctgtgttctacctagagaggctgaatcttgactgctcatcagtgctttttaagaaatcaaggccaggcgcagtggctcacaccagtaatcacagtacttcgggaggccaagtggggaggattgcttgattgagctcaagagttcaagacaagcctgggcaacatggtgagaccctgtgtctacaaaaaaaaaatttaaaaattagccagacacagtagtgtagtcccagctactcaggaggctgaggcaggaggatttcttgagcctgggaggtcaaggctgcagtgagccatgattgtgccactgcactcctgcctgggtgatagaatgacacattgcctcaaaaaaaaaaaaaaaaaaaaaaaggaaagaaagaagaaaagaaaaatagaaacattcacttcctaaaatactgcctcaacatatctcattccagacctattttaagaggtgagtctccaatgtggacttttatttagcaagaacatttgcttgtttatttacttgtttatgtagttatgtcagtatgactttatacattcttattttattcaatgctttataatcc

SEQ ID NO: 1100 - protein, 123 aa, Homo Sapiens
MSLPPCAPGHHGESRFFTFKSMTVAGQGDSDTAAISREPVACLLCVLPHWPPTCQLVLPASLTPAAGVAASAGGAESSKWLEQPREGGDPWEARSEFTWRTLEPQKHVCLWQPHGSTAGVNDP

SEQ ID NO: 1101 - DNA, 2221 bp, Homo Sapiens
ggccaggaacgccagccgttcacgcgttcggtcctccttggctgactcaccgccctggccgccgcaccatggacgcccccaggcaggtggtcaactttgggcctggtcccgccaagctgccgcactcagtgttgttagagatacaaaaggaattattagactacaaaggagttggcattagtgttcttgaaatgagtcacaggtcatcagattttgccaagattattaacaatacagagaatcttgtgcgggaattgctagctgttccagacaactataaggtgatttttctgcaaggaggtgggtgcggccagttcagtgctgtccccttaaacctcattggcttgaaagcaggaaggtgtgctgactatgtggtgacaggagcttggtcagctaaggccgcagaagaagccaagaagtttgggactataaatatcgttcaccctaaacttgggagttatacaaaaattccagatccaagcacctggaacctcaacccagatgcctcctacgtgtattattgcgcaaatgagacggtgcatggtgtggagtttgactttatacccgatgtcaagggagcagtactggtttgtgacatgtcctcaaacttcctgtccaagccagtggatgtttccaagtttggtgtgatttttgctggtgcccagaagaatgttggctctgctggggtcaccgtggtgattgtccgtgatgacctgctggggtttgccctccgagagtgcccctcggtcctggaatacaaggtgcaggctggaaacagctccttgtacaacacgcctccatgtttcagcatctacgtcatgggcttggttctggagtggattaaaaacaatggaggtgccgcggccatggagaagcttagctccatcaaatctcaaacaatttatgagattattgataattctcaaggattctacgtttgtccagtggagccccaaaatagaagcaagatgaatattccattccgcattggcaatgccaaaggagatgatgctttagaaaaaagatttcttgataaagctcttgaactcaatatgttgtccttgaaagggcataggtctgtgggaggcatccgggcctctctgtataatgctgtcacaattgaagacgttcagaagctggccgccttcatgaaaaaatttttggagatgcatcagctatgaacacatcctaaccaggatatactctgttcttgaacaacatacaaagtttaaagtaacttggggatggctacaaaaagttaacacagtatttttctcaaatgaacatgtttattgcagattcttcttttttgaaagaacaacagcaaaacatccacaactctgtaaagctggtgggacctaatgtcaccttaattctgacttgaactggaagcattttaagaaatcttgttgcttttctaacaaattcccgcgtattttgcctttgctgctactttttctagttagatttcaaacttgcctgtggacttaataatgcaagttgcgattaattatttctggagtcatgggaacacacagcacagagggtaggggggccctctaggtgctgaatctacacatctgtggggtctcctgggttcagcggctgttgattcaaggtcaacattgaccattggaggagtggtttaagagtgccaggcgaagggcaaactgtagatcgatctttatgctgttattacaggagaagtgacatactttatatatgtttatattagcaaggtctgtttttaataccatatactttatatttctatacatttatatttctaataatacagttatcactgatatatgtagacacttttagaatttattaaatccttgaccttgtgcattatagcattccattagcaagagttgtaccccctccccagtcttcgccttcctctttttaagctgttttatgaaaaagacctagaagttcttgattcatttttaccattctttccataggtagaagagaaagttgattggttggttgtttttcaattatgccattaaactaaacatttctgttaaattaccctatcctttgttctctactgttttctttgtaatgtatgactacgagagtgatactttgctgaaaagtctttcccctattgtttatctattgtcagtattttatgttgaatatgtaaagaacattaaagtcctaaaacatctaaaaaaaaaaaaaaaaaaaaaaaaaaaaaaaaaaa

SEQ ID NO: 1102 - protein, 370 aa, Homo Sapiens
MDAPRQVVNFGPGPAKLPHSVLLEIQKELLDYKGVGISVLEMSHRSSDFAKIINNTENLVRELLAVPDNYKVIFLQGGGCGQFSAVPLNLIGLKAGRCADYVVTGAWSAKAAEEAKKFGTINIVHPKLGSYTKIPDPSTWNLNPDASYVYYCANETVHGVEFDFIPDVKGAVLVCDMSSNFLSKPVDVSKFGVIFAGAQKNVGSAGVTVVIVRDDLLGFALRECPSVLEYKVQAGNSSLYNTPPCFSIYVMGLVLEWIKNNGGAAAMEKLSSIKSQTIYEIIDNSQGFYVCPVEPQNRSKMNIPFRIGNAKGDDALEKRFLDKALELNMLSLKGHRSVGGIRASLYNAVTIEDVQKLAAFMKKFLEMHQL

SEQ ID NO: 1103 - DNA, 5392 bp, Homo Sapiens
agccggagctggagccgaggcggcggcgggacgcggccggccggacaaatttcctgctaggctgcggacagcgggcggcaggagccggcgcgagcggcttcaggaacccacggcctctgcgcgtccccgcgacccttcttcgcgcccggcgaagacagccgggcgccccggagggcggcgggcaggcgcccgggagatgcggagcctccgctgcagcgcgatctgcgcgaccagaccggcccccccgagactatagccttcactttccctcggtccaccatggagcccttgtgtccactcctgctggtgggttttagcttgccgctcgccagggctctcaggggcaacgagaccactgccgacagcaacgagacaaccacgacctcaggccctccggacccgggcgcctcccagccgctgctggcctggctgctactgccgctgctgctcctcctcctcgtgctccttctcgccgcctacttcttcaggttcaggaagcagaggaaagctgtggtcagcaccagcgacaagaagatgcccaacggaatcttggaggagcaagagcagcaaagggtgatgctgctcagcaggtcaccctcagggcccaagaagtattttcccatccccgtggagcacctggaggaggagatccgtatcagatccgccgacgactgcaagcagtttcgggaggagttcaactcattgccatctggacacatacaaggaacttttgaactggcaaataaagaagaaaacagagaaaaaaacagatatcccaacatccttcccaatgaccattctagggtgattctgagccaactggatggaattccctgttcagactacatcaatgcttcctacatagatggttacaaagagaagaataaattcatagcagctcaaggtcccaaacaggaaacggttaacgacttctggagaatggtctgggagcaaaagtctgcgaccatcgtcatgttaacaaacttgaaagaaaggaaagaggaaaagtgccatcagtactggcccgaccaaggctgctggacctatggaaacatccgggtgtgcgtggaggactgcgtggttttggtcgactacaccatccggaagttctgcatacagccacagctccccgacggctgcaaagcccccaggctggtctcacagctgcacttcaccagctggcccgacttcggagtgccttttacccccattgggatgctgaagttcctcaagaaagtaaagacgctcaaccccgtgcacgctgggcccatcgtggtccactgtagcgcgggcgtgggccggacgggcaccttcattgtgatcgatgccatgatggccatgatgcacgcggagcagaaggtggatgtgtttgaatttgtgtctcgaatccgtaatcagcgccctcagatggttcaaacggatatgcagtacacgttcatctaccaagccttactcgagtactacctctacggggacacagagctggacgtgtcctccctggagaagcacctgcagaccatgcacggcaccaccacccacttcgacaagatcgggctggaggaggagttcaggaaattgacaaatgtccggatcatgaaggagaacatgaggacgggcaacttgccggcaaacatgaagaaggccagggtcatccagatcatcccgtatgacttcaaccgagtgatcctttccatgaaaaggggtcaagaatacacagactacatcaacgcatccttcatagacggctaccgacagaaggactatttcatcgccacccaggggccactggcacacacggttgaggacttctggaggatgatctgggaatggaaatcccacactatcgtgatgctgacggaggtgcaggagagagagcaggataaatgctaccagtattggccaaccgagggctcagttactcatggagaaataacgattgagataaagaatgataccctttcagaagccatcagtatacgagactttctggtcactctcaatcagccccaggcccgccaggaggagcaggtccgagtagtgcgccagtttcacttccacggctggcctgagatcgggattcccgccgagggcaaaggcatgattgacctcatcgcagccgtgcagaagcagcagcagcagacaggcaaccaccccatcaccgtgcactgcagtgccggagctgggcgaacaggtacattcatagccctcagcaacattttggagcgagtaaaagccgagggacttttagatgtatttcaagctgtgaagagtttacgacttcagagaccacatatggtgcaaaccctggaacagtatgaattctgctacaaagtggtacaagattttattgatatattttctgattatgctaatttcaaatgaagattcctgccttaaaatattttttaatttaatggtcagtatattttgtaaaaatcatgttaatttatttcatagttgacattaatatcttccctaatttctttgtatatattttgttatgccttaaaggccacctgctatacagttgttaaatcttaaatatgctttttaaaaattggaataatgtattaaggtcaaataatatcccataaaatatatatttctgctaatattagtaaatatcttaatttttcattagattcatatcatttaatttcacatattcaacacctttaaatgttgtaatcttaatatgcgaagtgtgcctctgcaagatactaacacaaagctcatgttaagaaaacagttgaggactcagaagtcagttcgaaaatgcactttcctaacagtgaattcacaaccctgaacagcagcatttttggaaggcaaactgttcgtgatggtacaatgtaaatggggacttctgtaaagttctcagtttcggtccatgtggtttatctttacattttaaagatcaaagaagtctttacaacctgaatccaggtctaaaacacactagagtagctggtgactataaataatattttaaaatgctgtgtctacaccatcaagactgtgtctacactatcttggctgaacgagaagagatgtaaatgctgggtggtcccgttgacccacggcgttgggtacaacaaaaccagccatcggagttacaccccaaagcaccatttgctgtccagctgcctgtcgtttggcccagaccaccctcagaaaaaaaccagctgcctctcccattctcccctcccgttctgccacagcggcctgggctggtccagtgctatgcctggaggctcaacacaaaacttcccatccaaacattcagatgaactgagcgtcttacacacgcagtacagaggagcacacattaggatagaaacagtagaataaccacgggcaattaaactttaaattttctgagcagcattttggtatttaaacatttcttgtaaaaagctgagacagtttgtaagaaaagaatccttaaaatctagatttataccattttttaaagtcccacctttcaatgtttaataaaacaaaaagagaaatccttaatctaaaagctaaattatttttgaatggaaatactactgagaccattgacactggataacagtaatgatcccattaccagataagattgactgacggggaaaaaaaaaaaaaaagaatggggtgtgaatgtaccaacactgaatcttacagcagttatctttctatggccattaggtacctagcagatgtgcacaatataaacaaaaagatatctggcctaccttactactaaaagcatttaacacgtgcatttttggtacttttttttttgttttctaaaagctacataaaggccttatttgacattttcactgataactgatcgcaccctcatgttgcagtgttcgtcccctattcattaacagtgtgtgcaaatgcaaccccaggacacattattgttctgatagatgctcacagggaatcaagcttctcgcccactccacggctctgagccccatccaagggcaagacttggtgcccagctggaaggacgaaagcacactttgtgaccgccatcctcaccagctgcatgcctgggctgcacactgctgaacgtgctcctctctccttctctgtacaatgattcagcatctcggcggaagaggaaaatggagctttttgaggctcgccaggtcccttttgttttcaccattaaaattccaaacccaaagcctttgtttgactgaaggagaagagagggaagtaagcttctgttcagcacctgaaccctagaaaaagagccagtttgctacgatgaaggtgacatttctctggtcatttatttgagagttcgaagtcaaagtcgaggggcaccggctttggttcatgtctaggagccctctgtcagaatccttgaagccctttaatggtctaactggcatctcttgtatcaagaagtacctttaaggtagaccttttcagggtgccctcaggaaagggccctgctcatgtttttttcctgtccccttagaccaaccccaggtgtccactgcaggggttctgcctgttcccaaactttttccattccaggaacaaaggagaagccactttccccaggacgcaagactctcccctccactgtccgggacagcgttcgccctttagcggggaggtcattacagcctcatggcctctaccaaggccccagatcacaggatctcctgggccttggagcacctcacgctgggggaatcaatccctgagggactcagaatcttctccgtgcaacctggaaagttcatctcttgtttccttcagtcaaagaaagtccattgtacataacaaaacagcccccaaacagcccagtgccgacaccattgttcctttcacactttcctttgttgcatgcagttgggttcaaatgccaaatagtgattagaagacgaccattctgatctgtgtgtgatctggtcactatgtgactgcctttacggtttctctccatgtgctatatgaatgaagaatgcataccagtgttttaaaaggtatttttatgtgtttttaaacacttttttaaatgagcctgacacctgtgtttcagcatttggagacatccccatgttattcttttaagtgtataattactgatacttttttgtttgtttgtttaactaagttgtgtttaacttatgtgcagtctttataatgtatgtatgttattacagtttcaactatcatattttctttgattacatttataatttgatcttgctctgattataatgccagtgaatgttgctgaactctttgtatatgcaaattgcaagatttaaaccattctgatgcaaggataaacctttactttgactaccagcctgtgtttttgtctttaaatctcttaatttcattcctctgcaaaaaaaaaaaaaaaaaa

SEQ ID NO: 1104 - protein, 700 aa, Homo Sapiens
MEPLCPLLLVGFSLPLARALRGNETTADSNETTTTSGPPDPGASQPLLAWLLLPLLLLLLVLLLAAYFFRFRKQRKAVVSTSDKKMPNGILEEQEQQRVMLLSRSPSGPKKYFPIPVEHLEEEIRIRSADDCKQFREEFNSLPSGHIQGTFELANKEENREKNRYPNILPNDHSRVILSQLDGIPCSDYINASYIDGYKEKNKFIAAQGPKQETVNDFWRMVWEQKSATIVMLTNLKERKEEKCHQYWPDQGCWTYGNIRVCVEDCVVLVDYTIRKFCIQPQLPDGCKAPRLVSQLHFTSWPDFGVPFTPIGMLKFLKKVKTLNPVHAGPIVVHCSAGVGRTGTFIVIDAMMAMMHAEQKVDVFEFVSRIRNQRPQMVQTDMQYTFIYQALLEYYLYGDTELDVSSLEKHLQTMHGTTTHFDKIGLEEEFRKLTNVRIMKENMRTGNLPANMKKARVIQIIPYDFNRVILSMKRGQEYTDYINASFIDGYRQKDYFIATQGPLAHTVEDFWRMIWEWKSHTIVMLTEVQEREQDKCYQYWPTEGSVTHGEITIEIKNDTLSEAISIRDFLVTLNQPQARQEEQVRVVRQFHFHGWPEIGIPAEGKGMIDLIAAVQKQQQQTGNHPITVHCSAGAGRTGTFIALSNILERVKAEGLLDVFQAVKSLRLQRPHMVQTLEQYEFCYKVVQDFIDIFSDYANFK

SEQ ID NO: 1105 - DNA, 5426 bp, Homo Sapiens
ggggaggaagaaaggcgaaggcaaggcgaaggggtggagagtgatatgaagagcgagagaaaagagaggacagcggacgagcagatccggtatctggaatcccggcgcctagaacgtgtttttcgggagagcaaaggctgtgtctacggcagcctggggatatagcctctccttccgatgaaaagagaaaggaagaatggactacagccaccaaacgtccctagtcccatgtggacaagataaatacatttccaaaaatgaacttctcttgcatctgaagacctacaacttgtactatgaaggccagaatttacagctccggcaccgggaggaagaagacgagttcattgtggaggggctcctgaacatctcctggggcctgcgccggcccattcgcctgcagatgcaggatgacaacgaacgcattcgaccccctccatcctcctcctcctggcactctggctgtaacctgggggctcagggaaccactctgaagcccctgactgtgcccaaagttcagatctcagaggtggatgccccgccggagggtgaccagatgccaagctccacagactccaggggcctgaagcccctgcaggaggacaccccacagctgatgcgcacacgcagtgatgttggggtgcgtcgccgtggcaatgtgaggacgcctagtgaccagcggcgaatcagacgccaccgcttctccatcaacggccatttctacaaccataagacatccgtgttcacaccagcctatggctctgtcaccaacgtccgcatcaacagcaccatgaccaccccacaggtcctgaagctgctgctcaacaaatttaagattgagaattcagcagaggagtttgccttgtacgtggtccatacgagtggtgagaaacagaagctgaaggccaccgattacccgctgattgcccgaatcctccagggcccatgtgagcagatctccaaagtgttcctaatggagaaggaccaggtggaggaagtcacctacgacgtggcccagtatataaagttcgagatgccggtacttaaaagcttcattcagaagctccaggaggaagaagatcgggaagtaaagaagctgatgcgcaagtacaccgtgctccggctaatgattcgacagaggctggaggagatagccgagaccccagcaacaatctgagccatgagaacgaggggatctgggcaccccaggaaccgccattgcccataagacccccaggaagctaggcactttctttccatggaaacatttagacacaaacctccccagctccggccaagccatcatttgctacctggagctggatgtagaagtcagcagacagctccctatccctggacccctgccctccttttttctgctcacaaggacttttgattttagttataaggaggacccaaaatgtgtgtgtgtacatgtgtgtgcacacatggtacgtgtccatgtgcctacctgatactttcacatgtaattaaattccaggcaaccagcacaagagccgtgagcttggcacatgtgctgctcgtgagcaggaaaatcagaggagccactgatctgagtggtatttaggttgaaggaaagatttctcctctcaagtgccagggagcagccacacgtctgtctgtgtttagagagggaagagggttctccaggttcaccatttgggttgtttatatgttggtagaaattctccctgtatgcctagaaggatcagtgaatgtaagagccttggaaattaacaaaataacagccacataaccttgcggcaagtctgatggaaagaaaaagataaaccatccgtggggtagatgcaataagcccacgtatttttacactggaaacgttgattgttttaaatgacaaagacatatgtgatgttctatgtggaaacctgtgaagagtggattctgcctccatctctgcctccatggctacctttaggagacagagaagatcctgtgtgtttctctgtacccagctgacagcctgtctctatggcgcttccttgagtggaaggaaatgtctcaagaaacaaagatctcgctggtgcgtacacagtgctgaccagctagtgtggccagggcctggtggcctggtggccaggaagtttcaggttgaagggaaatgtcgaggctacctgcagatatgacaggtgccttgaacgcagcccatcttcatgtcatcaaaggtcttcctgcacttgaagctggggcgatgtttgcagtcaagaccattctttccaacctctgggttcttgcaagttgccctcaccttgtgtgtggagatgcattccaagaatgaagcctcatcttgctactgagtgtggggttcagggaagctctttaggccacctggtgaaggtgcatggggaggatggagcttctcctcagctcctctgagcagccacctatgtgatctttaaatccaaccccaatgggagaaaagggcaagaacagtctgtgccctgggactcctatcaggaagcttgacaggcagctgggcatcagtgcagctgatatcgtttgaggagggagacagatgcttggacctgggtgcctggctatggagattgaccaagcaagatcaggagctcctgatagcaggcgtctttgagcctagctggggtagaggcactgcccatctcttctccaccttctctccacagaatgtttgcagagctgggcagttgaggaaaggacagcccctggttggtgcctccaaaggaaggtggacttttttggtggagacgtttctgccctgggcaccctcctgcccccgattcatacctatggcttcttgagaaggctcacagctgtggtcttaacgtagactgcagaaagatggcatgcggcccctggcatttcgccaagggttttatagcaagtctccttcctccatagggacagcagcaccagccctgtggggcatggagtggaagcccagaagggcttctgcaagctgcacagaactggggtaagaagacaaagagtagccaccgggagaggcttcctttgttacagctgggaaagaacagttctgtgaatgcaaacacctcctgagttttgcaattgagaaaatgatttggagaacttctcttctggtaatttttattttgaatgttcagggccttagttggccccagtaattctccttggaggacttgggagaagaatttccacaaagcaaactactaaccactagctcttactggacagcgatttctggcttataagagttctctttgatttgcactagcactacgatagtgttagatggggaaatactgcaacatgtccagttggccagatcactttccaagggagcgatactaaggcagactcagctttttaaagatgggaggtcaggaggtggaagtgagaggagatcccatctcacacaacacacttccacgtaatgcagaccacacttttccattttgtcctgccctcttgagaggtcatttctcacgtcctaagaacctgatcagaaattttggaagggttctttgaaatagcagcagttgaaacagagacactttgccacagtgtggagcagattttctcactggtatcacatggtcttgcagttttgaactcttcgaccgatttgtgggagtttatgtaattgcgtgcaatgaacctgaaattgtgtaaaggacaaaagaccagtttatagggttgggttttttttccaacttgtgaaaagcagtttagctgcatctgtctccccaccacccccaccccgggaggggcttatgttacaaggtgatcaagtgaaggaaaaacctgagcctatctggctgggatggtggaattaagcacaaggtcacattctctgtgatcacatgagagggaaggtgatgacttaaatggcagggggtggggattatcttggggagaggctgaaaagcacaaaagatagtcttccctgtacgtattggtgaagaacgtgcacaaggctggatggacttcaacttggagttgagttgaggcaagaggatttctggatattagtcacccatctgcaagaaaaatgctgaggcctcgggtcaagattttgatctgagacatgctgatgcttcaaggagaaatattttcacaatcctctcttccctcaccagaagagaacagtactctctcctagaaacctctaggtaaacacattttatcctaatatcggtagcatataatgccccccccaaaatatctgttttccatgcaaaaaagtctcaacaagaagtctgtggagttgagtggttacttcaaagtgtcaggagagtgaagaaattggccacagaagagcaagaagctctcttaagaaaagggaattctctttaaagaaaccaccaccaacaacaaaacaaccaaaaaccatgttttatgtcaaagctctgtagcacagagaatgtggtgtcacagatacatcgccgagagaggtttctttctttcttttttttttttttgagacagagtctggttctgtttcccaggctggagtgcagtggtgggatctcagctcactgcaacatccgcctctggggttcaagtgattctcctgtctcagcctcccaagtagctggaattacagggacccgccaccacgcccggctaatttttttgtgtggttttagtagaggtggggtttcaccatcttggccaggctggtcttgaactcctgacctcgtgatccacccgcctaggcctcccaaagtgttgggattacaggcgtgagccactgtgcccagccaaaagagaaatttctacatgaacaaggcaatttcagtgtcttacagcggccaaaccatgacgtgaagaatgagataggagacaggagatcaccataagcgtccctgatatagcagcacacattttcacgtttccacttaaatcgttttgcacaaagtcttgcttcgctcagatgagatgagatatgatttcctagagatgtaaaaataagaatgaatgtggcgcccccttcttccagatgtaatagaaagctctgccctatcacaaggggggtgttgaagcgccccttgtgttttaactgtatttaactgagcacaagatgcacaagctgtggtgggaaaccctcagtttacctttggagtcttccctgcagatcgcagacctgtttccaggctgatgtttctggtgtgtaattgctagcgtttctgaagggttttcccaattgttttagccttgtgaagtattcttaattataacttgcctttcagcgatggtacatgacttgattcaacgtttggttctgaacttacacactgatgcgtttactcatctaacataatctgacagggcctcagcaagggagccatacatttttgtaacattttgatatgttttaatgcatctgacttagatcttactgaaataaagcacttttcaaagag

SEQ ID NO: 1106 - protein, 326 aa, Homo Sapiens
MDYSHQTSLVPCGQDKYISKNELLLHLKTYNLYYEGQNLQLRHREEEDEFIVEGLLNISWGLRRPIRLQMQDDNERIRPPPSSSSWHSGCNLGAQGTTLKPLTVPKVQISEVDAPPEGDQMPSSTDSRGLKPLQEDTPQLMRTRSDVGVRRRGNVRTPSDQRRIRRHRFSINGHFYNHKTSVFTPAYGSVTNVRINSTMTTPQVLKLLLNKFKIENSAEEFALYVVHTSGEKQKLKATDYPLIARILQGPCEQISKVFLMEKDQVEEVTYDVAQYIKFEMPVLKSFIQKLQEEEDREVKKLMRKYTVLRLMIRQRLEEIAETPATI

SEQ ID NO: 1107 - DNA, 2787 bp, Homo Sapiens
cctagtcccagcccagggggccgctctcgccggcgtcgagggcgtggcggcgaggctgctgctgcaggcggctcccggctctgccttcggccccgcccgccgcccaccaggctcccagaggccccgcagctcgcgccgtccggctccccgcagccccgtcgggcagcccgggcccgtccgctgccctcccggctcccgtcctgcggcggcggggcgtgcaggtgaggccccacggcgcccggcctctccagcagtgggtgcctgatagacatcctaggactatacagaaggaaaaggcccactttgggggataatgctgagggacactatgaaatcttggaatgatagccagtcagatctgtgtagcactgaccaagaagaggaagaagagatgatttttggtgaaaatgaagatgatttggatgagatgatggatttaagtgatctgcctacctcactttttgcttgcagcgtccatgaagcagtgtttgaggcacgagagcagaaggaaagatttgaagcactcttcaccatctatgatgaccaggttacttttcagctgtttaaaagctttagaagagtcagaataaatttcagcaaacctgaagcggcagcaagagcgcgaatagaactccacgaaacagacttcaatgggcagaagctaaagctatattttgcacaggtgcagatgtccggcgaagtgcgggacaagtcctatctcctgccgccccagcctgtcaagcagttcctcatctcccctccagcctctcccccggtggggtggaagcagagcgaagatgcgatgcctgttataaattatgatttactctgtgctgtttccaaattgggaccaggagagaaatatgaacttcacgcgggaacagagtcgacacccagcgtggtggttcatgtctgtgaaagtgaaactgaagaggaagaagagacaaaaaaccccaaacagaaaattgcccagacgaggcgccccgaccctccgaccgcagcgttgaatgagccccagacctttgattgcgcgctgtgaggcccttggttgtggtgcgaggcggctgccctggtgggctctggccatggcgctctgtgcctgcggccgatgcgttgctgcgaacagcataggtgagactctgccgagtgaggtataggtcttctcaccacgcctgtactgcagacacggtcgtgtagagtagcagctgatttgacctgtcccagattttaagtgatattccaaaagggactttacattaaaggagaagcccccaagatgtggccacccttaaccatttttaaatagtaacaaattaggaaaacagctcccctcccctccagccatgtaagtcctcctgattctgtatcacatgagacaccaaaaactggaaatgtagtcacacccagtacagtaccatttttatgaatttaaaaatagtcttataattttaattgtttgtgggtatttttctactggtataaatagcttctaattaataaatcgatcaaaggttgttactcagtatacatgaaattttttgcaggaaaagaaaccagaaatacagaataattcatagaaatcatggttctcaagtatttgttcaattagctttggggaagaaatgccaaatccactttgaggatgagtcttacgacacagatccacccacatgttgctcttatctggaatttgggacaaagcaatgcacaggccctcattcctgatgtggcgccctccagacatggctgcccaggaaggacggccactttagaagtgggacgtatcaccagtaagcttgaatgattaggatcgcaggtggctactgcattctgccgttcgtgaccgtgttctagcctgtagaccacccagctaccttcattcaccagtttttatccttcaccttttccagtatcttgttaaccactagttcttgagttttttggctatgatgtgtacgtttatgtatgtcattcatggactttcaactagaaaaggtaatgataaggttttctgaagaccatttgtaaattgtccatttaaccatttttcagcttgctttgaaacaaaagtcacacctactatttttctatgaattagggaatgagggggagatcattcagttttacttttctttttgttgaaattttgtacccggattgcagttggcacttttcctaaaacagaattgtttcccacttaggtgtcagaatgtacctttgaacttccctaagaagcagcaggatctttttaactctctctggtctgtttagactttgaagtcccttctgtagaaaagtctcataactgagaaggctctgttttgggccgggtgggtctgctggcctccactcactgtgctgtttcctttgagtggcacacttgggaagctccggggcatgtgaaggagctgcaaacatgagaactaatgaaccaaggcggctgccaccaggaaggaacagaacgcaggcattcaaccatgacgtctgcacagtgttagtaacatgtcattgtggtttcgttctcactgtggtaaaatttatttctgagcacttaaactgtgttgcatacccctaattttttttttttctgtatcttccttgccctcaaataccctgaggtgataaactgttccagttgtagccaactaccactgctaggcctcaatgtaaattcagttgaaatttgcaattctatcagcaatttaatgtattgaattcagatcatcatttgtcattttaaccgacaaccacccaataaatttactctgcagttctgaactcaaaaaa

SEQ ID NO: 1108 - protein, 241 aa, Homo Sapiens
MLRDTMKSWNDSQSDLCSTDQEEEEEMIFGENEDDLDEMMDLSDLPTSLFACSVHEAVFEAREQKERFEALFTIYDDQVTFQLFKSFRRVRINFSKPEAAARARIELHETDFNGQKLKLYFAQVQMSGEVRDKSYLLPPQPVKQFLISPPASPPVGWKQSEDAMPVINYDLLCAVSKLGPGEKYELHAGTESTPSVVVHVCESETEEEEETKNPKQKIAQTRRPDPPTAALNEPQTFDCAL

SEQ ID NO: 1109 - DNA, 3012 bp, Homo Sapiens
gcgcagggcccccgcggccggggcagtcccgcagccgagcgcagccgggcgcgcgccaccgcccactcgccctgtgcccgccgcagcccgaaactggccacggccgggagcggaggggacagcggggatcgtgagctccggcccgggcgagcgggtgcgtctgccgcagagtcggcacctgaaggacatggaggaaagaccggcagagaccaatgccaatgtggacaactcggcgtccccctcggtggcccagctggccgggcggtttagggagcaggcggctgcagccaaggagacaccagccagtaaaccaacccgaaggaaaccgccctgttccctccccctgttcccccccaaggtagacctgggccagaatggtgaggagaaatcaccacccaatgcgagccaccctcctaaattcaaggtcaagagctcgcctctgattgagaagcttcaggccaatttaacctttgacccagctgctctactgcctggggcctcacccaagagtcctggactcaaggctatggtgtcgccatttcacagcccaccttctacccccagcagccctggtgtgcgatctaggcccagcgaggcagaggaggtgcctgtcagcttcgaccagccccctgaaggcagtcatctgccctgttacaacaaggtgcggacgaggggctcaataaaaaggcgccctccctccaggcgattccgaaggtcacagtcagactgtggagaacttggagatttcagggcggtggagtcatctcagcagaacggtgctaaggaagaggatggggatgaagtgttgccatccaagagcaaggccccaggatcccctttgtccagtgagggagcagcgggagagggagtgagaaccctgggacctgctgaaaagcctcctctgaggaggtcacccagcaggacagagaagcaggaggaggacagggccacagaggaagccaagaacggtgaaaaggccaggcggagttcagaggaggtggacggccagcacccggcccaagaggaggtcccggaatcgccccagacctctggcccagaggcagaaaataggtgtgggagccccagggaggaaaagccagctggagaggaagcagagatggaaaaggctacagaggtgaagggggagagggtgcaaaatgaagaggtgggacctgaacatgacagccaagaaacaaagaagctggaggagggagctgcagtgaaggagaccccccacagtccccctggaggagtgaagggcggagatgtccccaagcaggaaaaaggcaaggaaaaacaacaggagggggcagtgctcgagccaggctgcagcccccagaccggccctgcccagctggagaccagcagtgaggtccagagcgagccagcagtccccaagccggaggatgacactcctgtccaggacactaaaatgtgaagaacagctcattgtgccccagtgatgaagttgctggacacatctctttgcaggtagcagcaacagttgtagcagcagcagacgaagccattgcagaggcagaatatgctgagtgtctggagtcagcctgaagacacagggtggattatttcctggcctccacaccaaacgttcccttgcagatggagactgaatctgagggcagcagacttttatcagcttgagtttatgtcatttgatggacttggttcaacaacaagaacttacttaaaacaatgtactgtggtgatgagtcccaggggcactggtcagcctgtggagccctggatgctatccacacccacctatccctgcagctaatttagctgatctctaatttaactgagctctaatttagctgatcagattttgcttgggtaaagttcctttttaatgttctaaagtgtttacggttctcaaatatcagttaaaaactaattttaggtggccataaacataaaatagaaaccctgtaagttacagaagaccctaaattgtatcaaaaccctagagacaacttttcaatttgatccaaatttgaactggccaaccagtctttaaaacactggactagaagagataatgattgaaacatttaaaaaaaaaaagtgctccattcgcaggagcttttcctgtcctgtggttttccagttggtgaccaccatgggaggtcgctggctcggctcactcccttctcccacccttgagaatgtggagaactcccatggagaggcagaatggcaggaggtttcatgtcccgcgttgcatctcctcctgaaagaaaagcagtgatacctgaataatgctggctctccgattgatcctgtgaggatgaatttgcatttccagaatccttgagcatggattagatgtttcctgggaggtgccttgagtaccattatgtgcaagctacataattaaaacatttttcttagtttccctgggaagcttttcttgactcacagcccaggttcttctgcccaacacaaaaggagtgagttggggtctttagtctcttcttattgggtagctcttgctttaatattctgtttggtgagtgtaagggattctgcaagggacagggggcctgactacccagtctttgacttgtatcctctcccctcttcatacactcctgctgaaaaatgttaatccaaatacacatttaaacttagggtcggtccttattctgatttgagtattttaatgtctcagtgtgctgatttggtagttggaagaattattcttctggaggtctgttagactacatcctacactgacttcagaaaacagtctgtcagacaaaaaggccttatgtcaccactggtacctcagtttcctcatcccatttacagtttttctaactccagggtagtgtttagtgttaatatttgggatatattttttttcaaaactgtttttaagtagtttgtaatttgtaacaaacttgtaacctggttgggactgatattgtcatagctatgataaactttggatattagcagaatttgggaaaaaaaaaaaaaaaaaaaaaa

SEQ ID NO: 1110 - protein, 416 aa, Homo Sapiens
MEERPAETNANVDNSASPSVAQLAGRFREQAAAAKETPASKPTRRKPPCSLPLFPPKVDLGQNGEEKSPPNASHPPKFKVKSSPLIEKLQANLTFDPAALLPGASPKSPGLKAMVSPFHSPPSTPSSPGVRSRPSEAEEVPVSFDQPPEGSHLPCYNKVRTRGSIKRRPPSRRFRRSQSDCGELGDFRAVESSQQNGAKEEDGDEVLPSKSKAPGSPLSSEGAAGEGVRTLGPAEKPPLRRSPSRTEKQEEDRATEEAKNGEKARRSSEEVDGQHPAQEEVPESPQTSGPEAENRCGSPREEKPAGEEAEMEKATEVKGERVQNEEVGPEHDSQETKKLEEGAAVKETPHSPPGGVKGGDVPKQEKGKEKQQEGAVLEPGCSPQTGPAQLETSSEVQSEPAVPKPEDDTPVQDTKM

SEQ ID NO: 1111 - DNA, 910 bp, Homo Sapiens
ctcctcgccttcctccggctcagccgccgcgccgccgggctgctccttcttcctcctcgggcgcccgcggcgatgttcaaccgcgccgtgagccggctgagcaggaagcggccgccgtcagacatccacgacagcgatggcagttccagcagcagccaccagagcctcaagagcacagccaaatgggcggcatccctggagaatctgctggaagacccagaaggcgtgaaaagatttagggaatttttaaaaaaggaattcagtgaagaaaatgttttgttttggctagcatgtgaagattttaagaaaatgcaagataagacgcagatgcaggaaaaggcaaaggagatctacatgacctttctgtccagcaaggcctcatcacaggtcaacgtggaggggcagtctcggctcaacgagaagatcctggaagaaccgcaccctctgatgttccagaaactccaggaccagatctttaatctcatgaagtacgacagctacagccgcttcttaaagtctgacttgtttttaaaacacaagcgaaccgaggaagaggaagaagatttgcctgatgctcaaactgcagctaaaagagcttccagaatttataacacatgagcccccaaaaagccgggactggcagctttaagaagcaaaggaatttcctctcaggaccgtgccgggtttatcattgctttgttatttgtaaggactgaaatgtacaaaacccttcaatgggatgtgtgttttattaactgcttcaccagtaaattttgcatgatggctaagctaacataaaaaaagaataataataacttggaagttttagtttacaaaacagagattccttcaacactggacacgtcgagcattttgtagcttaattaaacctcatgtaaggccaaaaaaa

SEQ ID NO: 1112 - protein, 181 aa, Homo Sapiens
MFNRAVSRLSRKRPPSDIHDSDGSSSSSHQSLKSTAKWAASLENLLEDPEGVKRFREFLKKEFSEENVLFWLACEDFKKMQDKTQMQEKAKEIYMTFLSSKASSQVNVEGQSRLNEKILEEPHPLMFQKLQDQIFNLMKYDSYSRFLKSDLFLKHKRTEEEEEDLPDAQTAAKRASRIYNT

SEQ ID NO: 1113 - DNA, 2540 bp, Homo Sapiens
gattggctggcgcggattccagctgctttccaagtcagcggcgcctagtgagagtcaggggggcccggcccgcgccctccccgcccagccgcctccccgtcgacgcccagggctggggcgagccaggctgcctttcgaacttggggggcttctcctcttgtctcccactggtgctctggctgtgaatccatccaggggccaggatgacaatccgacaccaaggccagcagtacaggccgaggatggcatttctccaaaagattgaagcgctcgtgaaggacatgcagaacccagagacaggggtccgaatgcagaaccagagggtcctggtcaccagcgttcctcatgccatgacaggaagtgatgttctgcaatggatcgtccagcggctttggatctccagtctggaggcacagaacttgggcaactttattgtcaggtatggctacatttaccccctgcaagaccccaagaatctcattctcaagcctgatggcagcctctacagatttcagacaccgtatttctggcccacccagcagtggccagctgaagataccgattacgccatctatctggccaagcgaaatatcaaaaagaaagggattttggaagaatatgaaaaggaaaattacaatttcttgaaccaaaaaatgaactataagtgggactttgtcattatgcaggccaaagagcagtacagggctggaaaggagaggaacaaagcagacagatatgccctggactgccaggagaaggcatactggctggtgcaccgatgccctcctggaatggacaatgtgctggactacggcctggaccgagtgaccaatccgaatgaagtcaaggtaaaccagaaacaaacagtcgttgctgtcaaaaaagagatcatgtattaccaacaggccttgatgaggtccacagtgaagtcttctgtgtccctgggagggattgtgaaatacagtgagcagttctcatccaacgatgccatcatgtcaggctgcctccccagcaacccctggatcaccgatgacacccagttctgggacttaaatgccaaattggtggaaatcccaaccaagatgcgagtggaacgatgggccttcaacttcagcgaattgatccgagaccccaaaggtcgacagagcttccagtacttcctcaagaaagaattcagtggagagaatctgggattctgggaagcctgcgaggatctgaagtatggagatcagtccaaagtcaaggagaaagcagaggagatttacaagctgttcctggccccgggggcgaggcgctggatcaacatagatggcaaaaccatggacatcacagtgaaggggctgaagcacccccaccgctatgtgctggacgccgcacaaacccacatttacatgctcatgaagaaggattcttatgctcgctatttaaaatctccgatctataaggacatgctggccaaagctattgaacctcaggaaaccaccaagaaaagctccaccctcccttttatgcggcgtcacctgcgctccagcccaagccctgtcatcctgagacagctggaagaggaagccaaggcccgagaagcagccaacactgtggacatcacccagccgggccagcacatggctcccagcccccatctgaccgtgtacaccgggacctgcatgcccccgtctccttctagccccttctcctcctcctgccgctcccccaggaagcctttcgcctcacccagccgcttcatccggcgacccagcaccaccatctgcccctcacccatcagagtggccttggagagctcatcgggcttggagcagaaaggggagtgcagcgggtccatggccccccgtgggccctctgtcaccgagagcagcgaggcctccctcgacacctcctggcctcgcagccggcccagggcccctcctaaggcccgcatggctctgtccttcagcaggtttctgagacgaggctgtctggcctcacctgtctttgccaggctctcacccaagtgccctgctgtgtcccacgggagggtgcagcccctgggggacgtgggccagcagctgccacgattgaaatccaagagagtagcaaactttttccagatcaaaatggatgtgcccacggggagcgggacctgcttgatggactcggaggatgctggaacaggagagtcgggtgaccgggccacagaaaaggaggtcatctgcccctgggagagcctgtaaggaaagaggcaggctgagctgggggctctggaccaggaagatgctctgacagatgccatggtatgggccacaggacacacttgctcgagaaccaaagtgcatttgggtgacatttgaagattggggagacaagatggggtagattgtggcaaagaatgctctggctggttaccaggggccaactccttctcctcttcctgaccctccctcccctgggcagaagaaacgcatgtggaccagaagactttccctgctgccttaaaaccaataaaaggttaactttaagtttcttggaaaaaaaaaaaaaaaaaa

SEQ ID NO: 1114 - protein, 674 aa, Homo Sapiens
MTIRHQGQQYRPRMAFLQKIEALVKDMQNPETGVRMQNQRVLVTSVPHAMTGSDVLQWIVQRLWISSLEAQNLGNFIVRYGYIYPLQDPKNLILKPDGSLYRFQTPYFWPTQQWPAEDTDYAIYLAKRNIKKKGILEEYEKENYNFLNQKMNYKWDFVIMQAKEQYRAGKERNKADRYALDCQEKAYWLVHRCPPGMDNVLDYGLDRVTNPNEVKVNQKQTVVAVKKEIMYYQQALMRSTVKSSVSLGGIVKYSEQFSSNDAIMSGCLPSNPWITDDTQFWDLNAKLVEIPTKMRVERWAFNFSELIRDPKGRQSFQYFLKKEFSGENLGFWEACEDLKYGDQSKVKEKAEEIYKLFLAPGARRWINIDGKTMDITVKGLKHPHRYVLDAAQTHIYMLMKKDSYARYLKSPIYKDMLAKAIEPQETTKKSSTLPFMRRHLRSSPSPVILRQLEEEAKAREAANTVDITQPGQHMAPSPHLTVYTGTCMPPSPSSPFSSSCRSPRKPFASPSRFIRRPSTTICPSPIRVALESSSGLEQKGECSGSMAPRGPSVTESSEASLDTSWPRSRPRAPPKARMALSFSRFLRRGCLASPVFARLSPKCPAVSHGRVQPLGDVGQQLPRLKSKRVANFFQIKMDVPTGSGTCLMDSEDAGTGESGDRATEKEVICPWESL

SEQ ID NO: 1115 - DNA, 4587 bp, Homo Sapiens
gttccgcctggctgccccgcctgggagcggggtgggggcaggcgaaggggagggctgcgggtggaaaggggcgagcccctctcgcccgggactgggaagagcggccacggcgccgggcgaggcggcagggcgaggcagtgccatgctgcctttgtgcaaagttgggcggcgggcggcgcgccgcgcgcaggggccccgcacacccgcgaccgcgcgcagccgtggctgctgctgagtggcgggggcccccccgctccccccggcccttgaaggcggagagagctcgcgtctcgctcggcttcagggtaagtccagctgtgagcagagtgttctgttcttcacttccagcaagccagaactcttctatccataggccaacctatgttgcagttgattaaggggtgcagctcccatataaatgctggcagagtttcataaatggacgctgacatggactacgaaagacccaacgttgaaactatcaaatgtgtggtcgtgggtgacaatgccgtggggaagacgcgcttgatctgtgccagggcgtgcaacaccacactcacgcagtatcagctgctggccacccacgtgccaacagtgtgggcgattgaccagtaccgcgtgtgccaggaggtcttggagcgttctcgggatgttgttgatgaagtgagtgtttctctcaggctttgggatacttttggtgatcatcacaaagacagacgctttgcatatggcaggtctgatgttgtggtcctctgtttttcgattgctaatcccaattccctaaatcatgtgaaaagcatgtggtatccagaaatcaagcacttttgccctcgaacacccgttatccttgttgggtgccagcttgatctccgctatgccgacctggaagctgttaatcgagccaggcgcccgttagcaaggcccataaagagaggggatattttgcccccagaaaaaggccgagaggtagcaaaggaacttggcttaccatactatgaaacaagcgtgtttgaccagtttggtatcaaggatgtgtttgacaatgcaatccgagcagcgctgatttcccgcaggcacctgcaattctggaaatcccacctaaagaaagtccagaaacctttacttcaggcacccttcctacctccaaaagcccctccaccggtcatcaaaattccagagtgtccttccatggggacaaatgaagctgcctgtttactggacaatcctctatgtgccgatgttctgttcatccttcaggaccaggaacacatctttgcacatcgaatttacctcgctacctcttcttccaaattttatgatctgtttttaatggaatgtgaagaatccccaaatgggagtgaaggagcctgtgagaaagagaagcagagcagagatttccaggggcggatattgagtgtcgacccagaggaagaaagggaggagggcccgcctaggattcctcaggccgaccagtggaagtcttcaaacaagagcctggtggaggctctggggctggaagccgagggtgcagttcctgagacacagactttgaccggatggagtaaggggttcattggcatgcacagggaaatgcaagtcaaccccatttcaaagcggatggggcccatgactgtggtcaggatggacgcttcagtccagccaggcccttttcggaccctgctccagtttctttatacgggacaactggatgaaaaggaaaaggatttggtgggcctggctcagatcgcagaggtcctcgagatgttcgatttgaggatgatggtggaaaacatcatgaacaaggaagccttcatgaaccaggagattacgaaagcctttcacgtaaggaaagccaatcggataaaagagtgtctcagcaagggaacgttctcggacgtgacatttaaattggacgatggagccatcagtgcccacaagccgctgctgatctgtagctgtgagtggatggcagccatgttcggggggtcatttgtggaaagtgccaacagtgaggtgtatctcccgaacataaacaagatatcaatgcaagcagtattggattatctctataccaagcagttgtctcctaacttggatctggacccgctggaattaattgccttggcaaacagattttgcctgccacacttggttgcacttgcagaacagcatgccgttcaggagttgaccaaagccgccacgagtggcgtgggcattgacggagaagtgctctcttacttggaattggctcagtttcacaatgcccaccagttggccgcctggtgtttgcaccacatctgcaccaactacaacagtgtatgctccaagttccgtaaggaaatcaaatcaaaatctgcagacaaccaggaatacttcgagcggcaccgctggccccctgtgtggtacctgaaggaagaagatcactaccagcgtgtgaaaagggaacgagagaaggaagatattgcactaaataagcatcgctcaagacgaaagtggtgcttctggaattcatctccagcagtggcctgaagaggaagagaaaaaaaacaaaaaacagaaaccaatcggtaatctgatccaccacttttcaaagcactactataaaattcgtcttgttagagatacgacatagttcaggtttcgggcactgatcttcctccacttttgtgcatttatctttgttaggatcaaagcacaagctcaccatcaatgagcctggacaaaaagggaagctgactctcactgcattccttaaactgatatgtatattttttttgttaggaggcttaataaactttagtctgttattttgtttctttttatacaaagaaaaaaaattcagctttcatgtttctgattccagattggaaaatatttttatatggtctgttgtattttgttgaaatgaaaatactgtgtattactttattttacaggccacaattgattatgaagtcaccctgtgattctctttgcccacatgaccaccgagcattattacgtaattagagggttatccttttgttgtgaaaggaaggaggggactgaaatctcccaaagtgcaaattggagagtgtttaatctttgttctgttgaataacatcggtgtaattacaaagtcaactccaagaatgtgtatttacaatatttgccatgttaagtgctggtaattatatggttatatgtgccatgtaaaatatagtgatatcaaatattctgttgtttccaatgtctagtttcaagaggacaatctttataatcattagaagggcttattaaatcccagcattatccagggcaaactcactggtggacctgaatacataagataccattagtgcgctggtgttcggattgctgtattagggtttacatctctcagtattccttgaacttgccatgcttctgcatgcagattcttcactgacttgaattgagatgggcaagggaaaaggtccctggactccctcctgccatctacaggcttgtcacatctcaccaccagaaacaggcttcctcaggcttctcacctgtggccaacttcactttgtaagacccatatttttaactcttcccagggaaaattcatgttgctgcagaagtaggctaaggcagaccacccacttctgctgaaatgcattgggagcctgtgaaagcacaaagctggaggctgggcgcctgcgttctcctacacggaaaggaatctaattccaagagtctaggaaatggtgctattgtgagttcgttctgactctttctcattctgagttttcagtgttaaactaggaagtgtgacagcaggggagctttcgtgaggcagtcagtcattgcttctctgtaaattaaaatgttacagcacacacatacacacacagagagcatttcaaggccacagctccacacctgccatgggatgttaatgtggcagggggtggggctcattctgttgggaggtcaaattaccaatgccaaggactgttgattttgtttttatttttattttttcttctagcttttcagaagatggaaatgagacagttgagtccaaaccccaatgctgacagccatatgcatttgaaaatctatctagattacagatgggcatttattactggcagtggaaacaccagatagaagatcttaggagaggcccagaaatgcatcaccttgtcatgacaaaagagaaggcagtagagtagggatagttacaaatgcatccatcttaattattttcaataggcttgtaaatcttatcgatggaaggagaaaggagacaagatgtggaagaattgacatgtatcccaccataaaatggtagaagatgagttttcaatgagtagtcatagttgaaattttacaaccaaagctcccatttgattgtaatcttgccaaaatataatggatgtataaatgaacttggggtataagcaataatatccactagtgttgttatcagctactgtaaccaagtggctggttcatttggttgatgctgattatggcctttaaccatggtggtttgttgtgtgttttttatttcacaaaaagccaataaaattgtttagctataaaaaaaaaaaaaaaaaa

SEQ ID NO: 1116 - protein, 696 aa, Homo Sapiens
MDADMDYERPNVETIKCVVVGDNAVGKTRLICARACNTTLTQYQLLATHVPTVWAIDQYRVCQEVLERSRDVVDEVSVSLRLWDTFGDHHKDRRFAYGRSDVVVLCFSIANPNSLNHVKSMWYPEIKHFCPRTPVILVGCQLDLRYADLEAVNRARRPLARPIKRGDILPPEKGREVAKELGLPYYETSVFDQFGIKDVFDNAIRAALISRRHLQFWKSHLKKVQKPLLQAPFLPPKAPPPVIKIPECPSMGTNEAACLLDNPLCADVLFILQDQEHIFAHRIYLATSSSKFYDLFLMECEESPNGSEGACEKEKQSRDFQGRILSVDPEEEREEGPPRIPQADQWKSSNKSLVEALGLEAEGAVPETQTLTGWSKGFIGMHREMQVNPISKRMGPMTVVRMDASVQPGPFRTLLQFLYTGQLDEKEKDLVGLAQIAEVLEMFDLRMMVENIMNKEAFMNQEITKAFHVRKANRIKECLSKGTFSDVTFKLDDGAISAHKPLLICSCEWMAAMFGGSFVESANSEVYLPNINKISMQAVLDYLYTKQLSPNLDLDPLELIALANRFCLPHLVALAEQHAVQELTKAATSGVGIDGEVLSYLELAQFHNAHQLAAWCLHHICTNYNSVCSKFRKEIKSKSADNQEYFERHRWPPVWYLKEEDHYQRVKREREKEDIALNKHRSRRKWCFWNSSPAVA

SEQ ID NO: 1117 - DNA, 716 bp, Homo Sapiens
gaacaaccagctggatcagttctcacaggagccacagctcagagactgggaaacatggttccaaaactgttcacttcccaaatttgtctgcttcttctgttggggcttatgggtgtggagggctcactccatgccagacccccacagtttacgagggctcagtggtttgccatccagcacatcagtctgaacccccctcgatgcaccattgcaatgcgggcaattaacaattatcgatggcgttgcaaaaaccaaaatacttttcttcgtacaacttttgctaatgtagttaatgtttgtggtaaccaaagtatacgctgccctcataacagaactctcaacaattgtcatcggagtagattccgggtgcctttactccactgtgacctcataaatccaggtgcacagaatatttcaaactgcacgtatgcagacagaccaggaaggaggttctatgtagttgcatgtgacaacagagatccacgggattctccacggtatcctgtggttccagttcacctggataccaccatctaagctcctgtatcagcagtcctcatcatcactcatctgccaagctcctcaatcatagccaagatcccatccctccatgtactctgggtatcagcaactgtcctcatcagtctccataccccttcagctttcctgagctgaagtcccttgtgaaccctgcaataaactgctttgcaaattca

SEQ ID NO: 1118 - protein, 160 aa, Homo Sapiens
MVPKLFTSQICLLLLLGLMGVEGSLHARPPQFTRAQWFAIQHISLNPPRCTIAMRAINNYRWRCKNQNTFLRTTFANVVNVCGNQSIRCPHNRTLNNCHRSRFRVPLLHCDLINPGAQNISNCTYADRPGRRFYVVACDNRDPRDSPRYPVVPVHLDTTI

SEQ ID NO: 1119 - DNA, 6659 bp, Homo Sapiens
ccgggcggttggcgtcctctgcggctcctgccaggggcgggcttttcaaatcttccctttgaaggagtggcgacggcccggacagttcgcgttggagatggaggggccgagcctgaggggtcctgcgctccgcctggcggggcttcccacccagcaggactgcaacattcaagaaaaaatagacttagaaattcgaatgcgagaaggaatatggaaactcctttctctgagcactcagaaagatcaagttttacatgcagttaagaatctcatggtgtgcaatgctcgactaatggcctatacatcggagctacagaaattagaagaacagattgcaaatcagactggaagatgtgatgtgaaatttgaaagtaaagaacgaacagcatgtaaaggaaagattgccatatcagatattcgaataccactaatgtggaaagactctgatcacttcagcaataaagaacgatcacgacgctatgccattttttgtttattcaaaatgggagctaatgtgtttgatactgatgtggtgaatgtggataaaacaatcacagatatatgttttgaaaatgtaaccatatttaatgaagcagggccagactttcagataaaggtggaagtgtatagttgctgtacagaagaatcttctataaccaacacaccaaaaaagctagctaagaaactcaagacatctataagtaaagctacaggaaagaaaataagttcagtgcttcaagaagaggatgatgaaatgtgcttgctcctcagctctgctgtttttggtgtaaagtataatttgctagctcacactaccctaaccttggaaagtgctgaggatagtttcaagacccataatctgtctattaatggaaatgaggagtcttcattttggcttcccctgtatggcaacatgtgctgccgactagttgcccagccagcttgtatggctgaggatgcatttgcaggatttcttaatcagcagcaaatggtagaaggtctgattagttggagaaggttgtattgtgttttgcgaggaggtaaactctattgtttttacagtccagaggaaattgaagctaaagtggaaccagctttggtagtacccattaacaaggaaaccagaatccgggcaatggataaggatgccaagaaaagaatccataatttctctgtcatcaatcctgttcctggacaagctataactcagatttttgcagttgacaatagagaagatcttcagaagtggatggaagccttctggcagcatttctttgatcttagccaatggaagcactgttgtgaagaacttatgaaaattgagattatgtcaccacggaaaccacctttgttcttgacaaaagaggcaacctcagtctaccatgatatgagcattgattcacctatgaaacttgaaagtttaacggatataatacaaaaaaaaattgaagagacaaatgggcagttccttattggtcagcatgaagaatccttaccacctccttgggccacactctttgatggtaaccatcaaatggtcatccagaaaaaggtactgtatcctgcaagtgagccattacatgatgaaaaagggaaaaagagacaagctccccttcctccttctgataaacttccattcagcttaaaatcacagagtaacacagatcaattggttaaggacaactggggaaaaacaagtgtatctcagacatcgtctttggataccaaactatcaactctaatgcatcacttacagaaaccaatggctgctcctcgaaaacttctgcctgccaggagaaatagattaagtgatggtgagcacacagacactaaaaccaattttgaagccaagccagtgccagctccaaggcagaaatccatcaaagacattctggaccctagatcatggctgcaggcacaagtatagaaaactcttaatgataaaacatttaacaaaatctataactgtgaagcttaattcagaggcattatagaataatgtgtaattatataggtaaatatagtgatttataccaataattaataagctattaggtatagaaaaacattttataatgaagaagtggatttctcttttactcctgatttgcagaatgtaagtgatttctccagcagtgtgcaagaggcagtttctagacaatatcctaattgttggaagggttaatttattcctgaattagtaccaggcagtgaataagccctaggcagaataaagcattaaaatttcttttggggagagactgtctagtaatttaaaatgtgttaaatatgaaccatattctcattgtgagaattttaatactaatggaatgtttcaaaggttttattcaaaccacaaattatagaatccacccaagaaaattttcttagcattctggaattctcatctaatggttcactggctctcatctattgtttaactcactagtttataggcctgaccttttaaattcctgggataaattttagaatattaaattcttcatctttaaagggaatttgtaatgtgctattcaaacttgtttccttgatgagccctgaaatactgttgacattaactttcataaatgaagcataacacttactagtttagagaaatggtagatgaaatgctctttacattcaattttctgtgtgtggtgctaatttccattgtgactttggaatttagggaagtgagtagctgatcaacaccttaaaattcatttaatacttatttaaaaagaagatgagagattcaaaaatatcagaaaagttggccatggtaaataattttcagaattcttttttaaaattttaattagatttccttttcctagtaagagttgatgtctgctagtggtatttttcattaaatgtcatattcttacaacagtgacattggaatcatttccataggaggtaatttccatagcaactaatcatagtgacccaaacaggattataaagtcaagtgaggaataaatagcagaaaaataccttaaaggaacaaaaaatccattttttataataatgctttttgtaaacaagagcagaacagttttaaaaatctaattagaatttccaaataaaacagtttccataaggtgtcagcaacagcactaaaaatctcaaatcacactgaaccctaaatgtcattgcaagaaataaaaatttaagaattaaattgctgccctgtgtataatctcttgagatctttttaaagctagcaagaactctatttggatcagaactacattattacaaaacaaaatgaacacttgaccaaaaaaccacattaatttaaatggagcctttcattattttcagatagcggggtcttttccatttatagagaatgatgtaactgccaggacacttttgtgtttgcccaggactcctagtaagaattgaatcttgagggagtaatgataacaaaaggtttcttgtgactggtaacatcaggacagacagagtttttggtgagaagaaagtactatatgcctgcttgatagcatgtagagatcatcacatgtatggaaaccttaaaaagtaaacttattttttctaactagaaggctctcataagtttctgttatgattgccatttcaataaatgacattaaaaatctaaaggatattattgtttgaatttttgggttattttttaaaacttcattgctgtttttgacagcatttgtgactgtcattgccactaaattattgagctagaagatgctgcagggaaaattgttttgaagctggcatctaagcattcttttttttttcctagttgatgccttcctttattacaaatcagtattaaaacttccagattatattcttgtcatttttcctcatgcagataacagcaggaaggacttaaggtgtataagaaaaagaaagtattcatacagaaattacctagcagttgtgccctcagagtagaactttgaaacaggactgaagccctttttacctagaaccatttaaaagcctgagcaaggaccaccaccccctccccaccaaattattcggtctctttctggggggcccagcttactgtatgttacaagtctttgaaatgggtctggtgtcttcagctcctgaaatgctaatttaccccttacctaaggagtgtagttataatacagagttggtttccttccttccttccttccttccttccttccttccttccttccttccttccttccttccttccttcattccctctgtccgtctctccttccctccttccctccttccttcctttttgtctttgtttctttctctggccccctgtcctctctctctgtctcatccccttttcccactttccttctgtctctccttcctcccttcctttacagtttaaaaaaaaaatctaaaaatagttaagcactgtgtcaaagagtgtttcaaaagaattgtttgttttctcatttcttaaaccagaagtttatgacaaataaatatgccatgtaatatgaaagctgcttcagctttttatgagctttcacattccttgtttgtccttttaatttgtttcttgatatatgaagactataaacttgaaacaaagagttagctgtcagctcttgataatataattggggaaacagaatagatattttatgatatgataattctgatgatctaaagataatgtcttagacaattacctttacatttcaagctctgggatataaattacgtagtcagcattaagatagtattatttttaattgctactaagtggtaacttttgtattttaatatcttgcaagggcaaagaaggcatttttaaaattctaaatgcacacctcctaaggtaaatagtctttcaaaaatatcaggcgtgccaactcttgctgagttttgttaaatcctccttaactgtctgcagtgccccctgacttcttttaaatggatgtgaatatatgtggaaaactaaatccatttattataaatgccttatctttaccctttgggatcttactaaatgcattttacctgctactatttattaaaaatggaagctgtcttgaattagagatacctcacgtaaggtaggttaagcagtcaagtatttctttaggcttatgttcagcacctcagccccctactgagaagttaattaattcagtccaaaatgaaattatagggcagtttggtgcaatttatgttaaatgccatttgaatgtaatcacctgtgttaccacgaatgaggcacaactatactacatggacagagtactgcattgcaccatgagcaagaactgctctgcaagaaaaatatctgtccctgtggtctgaatttatcaaaactcattttcttgttaaagagtgaattattgaatagtaattaaactttaactgatgaccatttatattctagtagccatcttcactgttagtcttaaattataatgtaaagttgacattttccccttacatttcaaaggcatcactatttttaaatgtttacatatgtttacatgtttgtgtgcaactgcttcattgctattaatagttaaatgaaatctgcatattctggatcatagatgttcttagttaactctgggaaagatgttacctttgggtttttaaaagacaagtcatcatttgaaaatatattagggtgtgttgattttctgacatgcttgtgtaattggctttgtttataatttttattttttaatatgggtcagacttttggattaaaaagtattatatcatggacatacattttttaaagtaccaaaggtatttggtaagcgagcccaagtcatgtaattgaaacttctgtacattaaaagaactgattcatgaagacgttttctaactttttctctttaagtgctcctctagactagactgattgaagtagacagtgtggtggaatcagtttaatcagaaaaagacataccaagtagctggtgctaattattataagactaacattctgataagccatggtataattaacattattaaaatgtttacatataatccttcttaaagtatactcttttaaaaatccattgacataaccttacttttagtttagtgatccagaatttccccagagcttaagccactgcagtaaattaggtacgtaggatattcagtcgctactagccacaaggagtctccttattttaatgtacctccctcagtactttattcctgcagagcgcctcagagtgggggagagaaatgagcaatcctggctcagttggattatttcagcattttatttctaaatctgtagtgtgatcagaaatatttaaaattaaaaaaatactttacagagagaggcctactaatcaatgtgcttagagaaacaaactacctttacattcaattaacaacaaaaaaagttacagaaattttaacaaacatttttctttatctgagtatgggagaaaatactaatgctgacacgtttaataattagaaaagatcattccagatcttatggaaaattgtgttttaaattccagcagtttgctcttgagacatggtaatctcttaatgtaactactaaaggagaggtagattgaaaagatcttgtatatacataattatgtcagatggttcaagatatcaaaataaattgttttgttgaaaatgaaaaaaaaaaaaaaaaaaaa

SEQ ID NO: 1120 - protein, 609 aa, Homo Sapiens
MEGPSLRGPALRLAGLPTQQDCNIQEKIDLEIRMREGIWKLLSLSTQKDQVLHAVKNLMVCNARLMAYTSELQKLEEQIANQTGRCDVKFESKERTACKGKIAISDIRIPLMWKDSDHFSNKERSRRYAIFCLFKMGANVFDTDVVNVDKTITDICFENVTIFNEAGPDFQIKVEVYSCCTEESSITNTPKKLAKKLKTSISKATGKKISSVLQEEDDEMCLLLSSAVFGVKYNLLAHTTLTLESAEDSFKTHNLSINGNEESSFWLPLYGNMCCRLVAQPACMAEDAFAGFLNQQQMVEGLISWRRLYCVLRGGKLYCFYSPEEIEAKVEPALVVPINKETRIRAMDKDAKKRIHNFSVINPVPGQAITQIFAVDNREDLQKWMEAFWQHFFDLSQWKHCCEELMKIEIMSPRKPPLFLTKEATSVYHDMSIDSPMKLESLTDIIQKKIEETNGQFLIGQHEESLPPPWATLFDGNHQMVIQKKVLYPASEPLHDEKGKKRQAPLPPSDKLPFSLKSQSNTDQLVKDNWGKTSVSQTSSLDTKLSTLMHHLQKPMAAPRKLLPARRNRLSDGEHTDTKTNFEAKPVPAPRQKSIKDILDPRSWLQAQV

SEQ ID NO: 1121 - DNA, 5553 bp, Homo Sapiens
gtgtgaatgcttcattcgcctcacaaacaaccacagaaccacaagtgcggtgcaaactttctccaggaggacagcaagaagtctctggtttttaaatggttaatctccgcaggtcactaccagccaccgagaccaacagagtcatttaaggctgcaagcagtatttacaacagagggtacaagttctatctgaaaaaaaaaggagggactatggcatcaaacagcctcttcagcacagtgacaccatgtcagcaaaacttcttttgggatccgagcaccagccggcgcttcagccccccctccagcagcctgcagcccggcaaaatgagcgacgtgagcccggtggtggctgcgcaacagcagcagcaacagcagcagcagcaacagcagcagcagcagcagcaacagcagcagcagcagcaggaggcggcggcggcggctgcggcggcggcggcggctgcggcggcggcagctgcagtgccccggttgcggccgccccacgacaaccgcaccatggtggagatcatcgccgaccacccggccgaactcgtccgcaccgacagccccaacttcctgtgctcggtgctgccctcgcactggcgctgcaacaagaccctgcccgtggccttcaaggtggtagccctcggagaggtaccagatgggactgtggttactgtcatggcgggtaacgatgaaaattattctgctgagctccggaatgcctctgctgttatgaaaaaccaagtagcaaggttcaacgatctgagatttgtgggccggagtggacgaggcaagagtttcaccttgaccataaccgtcttcacaaatcctccccaagtagctacctatcacagagcaattaaagttacagtagatggacctcgggaacccagaaggcacagacagaagcttgatgactctaaacctagtttgttctctgaccgcctcagtgatttagggcgcattcctcatcccagtatgagagtaggtgtcccgcctcagaacccacggccctccctgaactctgcaccaagtccttttaatccacaaggacagagtcagattacagaccccaggcaggcacagtcttccccgccgtggtcctatgaccagtcttacccctcctacctgagccagatgacgtccccgtccatccactctaccaccccgctgtcttccacacggggcactgggcttcctgccatcaccgatgtgcctaggcgcatttcagatgatgacactgccacctctgacttctgcctctggccttccactctcagtaagaagagccaggcaggtgcttcagaactgggccctttttcagaccccaggcagttcccaagcatttcatccctcactgagagccgcttctccaacccacgaatgcactatccagccacctttacttacaccccgccagtcacctcaggcatgtccctcggtatgtccgccaccactcactaccacacctacctgccaccaccctaccccggctcttcccaaagccagagtggacccttccagaccagcagcactccatatctctactatggcacttcgtcaggatcctatcagtttcccatggtgccggggggagaccggtctccttccagaatgcttccgccatgcaccaccacctcgaatggcagcacgctattaaatccaaatttgcctaaccagaatgatggtgttgacgctgatggaagccacagcagttccccaactgttttgaattctagtggcagaatggatgaatctgtttggcgaccatattgaaattcctcagcagtggcccagtggtatctgggggccacatcccacacgtatcaatatatacatatatagagagagtgcatatatatgtatatcgattagctatctacaaagtgcctattttttagaagatttttcattcactcactcagtcatgatcttgcagccataagagggtagatattgagaagcagaaggctcaagagagacaattgcaatcgagcttcagattgtttactatttaagatgtacttttacaaaggaacaaagaagggaaaaggtatttttgtttttgttgtttggtctgttatcatcaataacctgttcatatgccaattcagagaggtggactccaggttcaggagggagaagagcaaagccgcttcctctctgtgctttgaaacttcacaccctcacggtggcagctgtgtatggaccagtgccctccgcagacagctcacaaaaccagttgaggtgcactaaagggacatgaggtagaatggatgcttccatcacagtaccatcattcagaataactcttccaatttctgctttcagacatgctgcaggtcctcatctgaactgttgggttcgtttttttttttttttttcctgctccaagaaagtgacttcaaaaataactgatcaggatagattattttattttactttttaacactccttctccccttttcccactgaaccaaaaagaaatcccatccctaaaacctgccttctccttttatgcaaaactgaaaatggcaatacattattatagccataatggtatagatagtgattgcgtttggctatgtgttgttttctttttttttaaattatgaatatgtgtaaaatctgaggtaacttgctaacgtgaatggtcatataactttaaagatatatttataattatttaatgacatttggacccttgaaacatttcttagtgtattgatatgttgacttcggtctctaaaagtgctctttattaaataacaaatttcttcagtggtctagagccatatctgaaatattgctaagcaatttcagttcatccaggcacaatgtgattttaaaaaatacttccatctccaaatattttagatatagattgtttttgtgatgtatgaaggaaatgttatgtttagttctttcagatctttgaatgcctctaacacagctttgccttctaaagcggtaattagggatttaaaaaacaacctttagccctttatcagcatgaaatgctggagtgatgtggttttctaatttctttggggtaattatgactcttgtcatattaaaaagacaagcacaagtaaatcattgaactacagaaaaatgttctgtggtttcatagttaagcaaaactctaaatcgccaggcttcatagcaaagacatagtcagctaaaagccgcacatgtggatagagggttcaattatgagacacctagtacaggagagcaaaattgcaccagagattcttaaccaaccagccttaccaaacaacacaacaggggaaccccaatctgccttacccaaggccccactggcagctttccacagaatttgcatttagaggagcagaatgacatcactgtcctttgggagtaggtcctctgaaaaggcagcaggttccagcaggtagctgagctgagaggacatatggcccacggggacctacagacagcctttgacatttgtatttcttacaatggagggccaaggagggcaaggggctgtggagtttggtgtctactagtgtgtatgaatttgagctagagtccttctgtggcatgcactttgaccactcctggcagtcacatggcagatttccaagtgcaaatccttaatccaaacaaggatcatctaatgacaccaccaggccaatccctgctctcctccccgaaaagtcagggtcccttcattggaatcctccacccacccaagcagaatttagcagagatttgccttcaaaccctaacggcccccttgttctctggtccttctcaaacccacctttgtaggccacccagcattgcaggacagcgtgtggggcagctggacctgtgcttcctgcctgggagtctcccttggaattcatcctgactccttctaataaaaatggatgggaaagcaaaacactttgccttctaaaggccgtataccaagtatgcttagataaataagccacttttctattacttaagtaagaaggaagtagtaattgatactatttattgtttgtgtgtggtagcttgaagcacaccactgtccatttatttgtaagtgtaaaatatgtgtgtttgtttcagcagcacttaaaaaagccagtgtctggttacacatttcaattttaattaattgacataaaaatgctaccgccagtgccagctgcatcctatttaattaaaaaggtactatatttgtacattattttttaatgttaaaagggcttttttaagtttacagtacacataccgagtgactttagggatgcttttgtgttgaaatgttactatagtggctgcaggcagcaacccagaaacactttagaagctttttttccttgggaaaaattcaagcacttcttccctccaccctcactccaaccaccccaatgggggtaattcacatttcttagaacaaattctgcccttttttggtctagggattaaaattttgtttttctttctttctttttttttttttttcactgaacccttaatttgcactgggtcatgtgtttgatttgtgatttcaagaccaaagcaaagtcttactactactgtggaaccatgtactagttcctgggaattaaaatagcgtggttctctttgtagcacaaacattgctggaatttgcagtcttttcaatgcagccacatttttatccatttcagttgtctcacaaattttaacccatatcagagttccagaacaggtaccacagctttggttttagattagtggaataacattcagcccagaactgagaaactcaacagattaactatcgtttgctctttagacggtctcactgcctctcacttgccagagccctttcaaaatgagcagagaagtccacaccattagggaccatctgtgataaattcagaagggaggagatgtgtgtacagctttaaggattccctcaattccgaggaaagggactggcccagaatccaggttaatacatggaaacacgaagcattagcaaaagtaataattatacctatggtatttgaaagaacaataataaaagacacttcttccaaaccttgaatttgttgtttttagaaaacgaatgcatttaaaaatattttctatgtgagaattttttagatgtgtgtttacttcatgtttacaaataactgtttgctttttaatgcagtactttgaaatatatcagccaaaaccataacttacaataatttcttaggtattctgaataaaattccatttcttttggatatgctttaccattcttaggtttctgtggaacaaaaatatttgtagcattttgtgtaaatacaagctttcatttttattttttccaattgctattgcccaagaattgctttccatgcacatattgtaaaaattccgctttgtgccacaggtcatgattgtggatgagtttactcttaacttcaaagggactatttgtattgtatgttgcaactgtaaattgaattatttggcatttttctcatgattgtaatattaatttgaagtttgaatttaattttcaataaaatggcttttttggttttgtta

SEQ ID NO: 1122 - protein, 521 aa, Homo Sapiens
MASNSLFSTVTPCQQNFFWDPSTSRRFSPPSSSLQPGKMSDVSPVVAAQQQQQQQQQQQQQQQQQQQQQQQEAAAAAAAAAAAAAAAAAVPRLRPPHDNRTMVEIIADHPAELVRTDSPNFLCSVLPSHWRCNKTLPVAFKVVALGEVPDGTVVTVMAGNDENYSAELRNASAVMKNQVARFNDLRFVGRSGRGKSFTLTITVFTNPPQVATYHRAIKVTVDGPREPRRHRQKLDDSKPSLFSDRLSDLGRIPHPSMRVGVPPQNPRPSLNSAPSPFNPQGQSQITDPRQAQSSPPWSYDQSYPSYLSQMTSPSIHSTTPLSSTRGTGLPAITDVPRRISDDDTATSDFCLWPSTLSKKSQAGASELGPFSDPRQFPSISSLTESRFSNPRMHYPATFTYTPPVTSGMSLGMSATTHYHTYLPPPYPGSSQSQSGPFQTSSTPYLYYGTSSGSYQFPMVPGGDRSPSRMLPPCTTTSNGSTLLNPNLPNQNDGVDADGSHSSSPTVLNSSGRMDESVWRPY

SEQ ID NO: 1123 - DNA, 4540 bp, Homo Sapiens
gaatgcattagtctaatgagatgtttgcagctggagcgcagggctgctggagactaactgtgagctactaacacgggtggaagatagcttttgcaatactcggtttgcatgtgctgaaagtcatctgtcttctgagtcaacactcccgacctggtaaacaacctgctcagggctctggtgaacaagctgtagcacctcttctgcctgtgagcgatttgtcacctcattctgtaagactggcaccagcagaaatgcagtctcaaaggatcccggggagaaagcgaggccgaccctcacttcactccacgcctatgaagatggcagttcataacctttattctgcttcagctggctctttaccagcagtgaagatcccaaagaaaagagggcggaaacccgggtacaagatcaagtctcgggttctcatgactcccttagccctctcacctccgcggagtaccccagagcccgacctcagctccatccctcaggacgcagccacggtccccagcttggcggccccacaggctctcacagtctgcctctacatcaacaagcaggccaatgcggggccctatctggagaggaagaaggtgcagcagctcccggagcattttgggcccgagcggccatcggcggtgctgcagcaggccgtccaagcctgcatcgactgcgcccaccagcagaagctggtcttctccctggtcaagcagggctatggtggtgagatggtgtcagtctcggcttcctttgatggcaaacagcacctgcggagcctgcctgtggtgaacagcatcggctatgtcctccgcttcctcgccaagctgtgccgaagcctcctgtgcgatgacctcttcagccaccagcccttccccaggggctgcagtgcctctgagaaagtccaggagaaagaggaagggaggatggaatcagtcaagacagtcaccaccgaagagtacctggtgaaccctgtgggcatgaaccgctacagcgtggacacctccgcctccacctttaaccacaggggctccttgcacccctcctcctcgctgtactgcaagaggcagaactctggagacagccaccttgggggtggtcctgctgccaccgctggtggtccccgcactagccccatgtcttctggtggcccctcggcacctgggctgaggcctccagcctccagccccaagagaaacacgacctctcttgaaggaaacagatgtgcctcaagcccttctcaggatgcgcaggatgccaggcggccacggagcaggaacccctccgcctggactgtggaggacgtggtgtggtttgtgaaggacgccgacccacaggctctggggcctcacgtggagctcttcagaaagcacgagattgatggcaacgctctgctgttgctgaagagtgacatggtcatgaagtacctgggcctgaagctgggacctgcactgaaactctgctaccacattgacaaactgaagcaagccaagttctgacttttttaaaaagacagaagcgaaacccaaaacaacagatcccaagattatcttctgccttaccaatatcccgccaacatcacaaactagactctcctcttaaaattaacagccacagagacgtggtctttttataaaacttgtgaatctttgccttttgaagaatttaacatggaccttttcgagaggctcctctgtgttcataatttgccaaaaaattacaaaagcctgtgatttttaacatccctgttatgctggtttctcttaaagtgggtcctatttgcataacgagagagtggggaactgaatgcttatgcccaaggagagttctggagggttcaaaggatgaaagaaggacctttgtccctgcggtctctgcagggacaaccccctcagcaccatctgcctctaactctgacctggggacctatccatgtgagccttgtttgcctcagctctggaagctgacttctgaagatgactgcctcaccttgcactgtctggaaaacttgaattattttacgccgtgaaagaaaaaggaaaaaaaaaaaaatcttttctgttcctagaaaatctgaagtactgtgtttctccgctagagggcagactgctaatgaaatttcaggaccctcactgactgcagtagcaggattgttcagtactgagtggatgggttagggtgtctgtgaacaagatctagcccacacagaaacaggggatttattccacagttagcaccacagattgcgacttgggaagaaaccatcagctagaggggtctagttcgtatccaatcattattgactgactgactgatactcaactagcaaaggcaagaatttggaagcacgctctacccagatgggactttggagttccttcccttccagagtccttattgaggtgttgaagtgttggcatgccgaagaatcttagtgacatttagccatgggtgtttctttaaaaaaggaaaagaaaatgtctcaacgaagctttgaaatgggagagtgttgatttctagttacattgctgggttatgtagttgtatctgtggctaatttttctagtcctcaacaaatacacagacatgctattatggggtttaattcaatttacaaataggttttccttcctcacagtggagtaatagaaaaaattgattttctgctcctttgcagctgtgtccagagacggacaatgaatccacaatttattaggcagaggcacaacttctccaccattcgttttatccttctcttttctctgtttccctccacctctcttcttcttctttcacactgagcagaaaacatatcttcaaaatgaattcgcctttgccatgtgcatattctcttccttaaaaggacatcaacagtgttggagatgaggagatgaacattagattttggaatttctgggagggagagggttagggatgactcagggcctcccttcgcccaaaggtgaatcagaaaaggcacccctttctctgggatacaacctgagcaggggtctcagctggcaagtggagcagggtgggggctcaacctcctcaccgcttgatcagctgccgttgtacagagcatgacctgtataaccttgagggcagccctgggtagatctgcagagtgaccctctatatagttagaatccagatgaaggccataagaaatagtccatgccatgccgttaggcccactttcatgtgcagtacttgagaaagcacatcgtagcctccttttcagacacacaaatggcggctggactgagagcatggcagagaaggggaggaggagaatgtactaaacttgctcactgaattgagcttgagttattagattgtagaagagcttgatgtctggtgattttgttacaggaagggggtcccgatccagaccccaagagagggctcttggatctcatgcaagaaagaattcagggtgagtccataaagtaaagtgaaagcaagtttattaagaaagtaaaggaaggaaagaatggctaccccatagtcaaagcagctctgagggctgctggttgcccatttttatgtttatttcttgatatgctaaacaaggggtggattattcatgcctcccccttttagatcatatagggtaacttcctgatgttgccatggcatttgtaaaccgtcatggcactggtggtagtatagcagcgaggacaaccagaggtcactctcgttgccatcttggttttggtgggttttagccaacttctttactgcaacctgttttatcagaaggtctttatgacctatatcttgtgctgacctcctgtctcatcctgtgactcagaatgctttagccatctgggaatgcagcccagtaggtctcagcctcattttacccagctcccattcaagatggagttgctctggttcaaatgcctctgacaggttcagcacctgagaaaagtaccttgaatcaggccttggggcagagtcttcaagattttaaggtgatagggcctgtctcttaagaatttattaatcgtaagtgctcactgctggtttagagttagatacatttccctcaaaacagccatgggcaggttatgtactcagaactgccagggtgaaaacaatgagatccagaaaaatcccacaacaatccaggtttttcactcctcttttttttctcaatcttccgatacttgtggtacctcttccatcaacagatacctcatgtagtgacttccagtatcaagttttcaaaacttcctacccaccctcatcagtgcctccttcactacagagtcacaaacattggtgctctcaaataaaaatcagccccaaacaatgtcaaagagatcccttgagtagttttcaggcgagagatatgttctcatttcaagtcttggagaaaactggatccatgttcacgtggaacttctctcgcggaggtgctatctcattttgcattaaactttaagcaggacagattgctgaagccatgatatttaaggtttgactttttaaaaatctcattactcttaaaataaatgctgccacatcagaaaaa

SEQ ID NO: 1124 - protein, 414 aa, Homo Sapiens
MQSQRIPGRKRGRPSLHSTPMKMAVHNLYSASAGSLPAVKIPKKRGRKPGYKIKSRVLMTPLALSPPRSTPEPDLSSIPQDAATVPSLAAPQALTVCLYINKQANAGPYLERKKVQQLPEHFGPERPSAVLQQAVQACIDCAHQQKLVFSLVKQGYGGEMVSVSASFDGKQHLRSLPVVNSIGYVLRFLAKLCRSLLCDDLFSHQPFPRGCSASEKVQEKEEGRMESVKTVTTEEYLVNPVGMNRYSVDTSASTFNHRGSLHPSSSLYCKRQNSGDSHLGGGPAATAGGPRTSPMSSGGPSAPGLRPPASSPKRNTTSLEGNRCASSPSQDAQDARRPRSRNPSAWTVEDVVWFVKDADPQALGPHVELFRKHEIDGNALLLLKSDMVMKYLGLKLGPALKLCYHIDKLKQAKF

SEQ ID NO: 1125 - DNA, 4656 bp, Homo Sapiens
gggcgggtgggaggagagcgcgaaggggcgaggcccgtttgcaggggccgctcggcccggggaagcccgcgccccgctcagccttgcagccccgcgcccggagcatctccctggaggaacggagacaaaggaggattcatgtccaaagggctcccagagaccaggacggacgcagccatgtcagagctggtgcctgagcccaggcctaagccagcggtgcccatgaagcccatgagcatcaactccaacctgctgggctacatcggcatcgacaccatcatcgagcagatgcgcaagaagaccatgaagaccggtttcgacttcaacatcatggtcgttggccagagtggactgggcaaatcaacgctggtcaacacgctcttcaaatcccaagtgagccgcaaggcctccagctggaaccgggaggagaagatccccaagacagtggagatcaaagctatcgggcatgtgatagaggaaggcggtgtcaaaatgaagctgaccgtcatcgacaccccaggctttggagaccaaatcaacaatgaaaactgctgggagcccattgagaagtacatcaatgagcagtacgagaagttcctgaaggaggaggtcaacatcgccaggaagaaacgcatccctgacactcgtgtccactgctgcctttacttcatctctcccacaggacactccttgcgacctctggatcttgagttcatgaaacacctcagcaaggttgtgaacatcatccctgtcattgctaaggctgacaccatgaccctggaggagaagtctgaattcaagcaaagggttcgcaaggagcttgaagtaaatggcattgaattctacccccagaaggaatttgatgaggatttggaggataagacggagaatgacaaaatcaggcaggagagcatgccttttgctgtggtgggaagtgacaaggagtaccaagtgaatggcaagagggtcctcggccgaaaaactccatgggggatcatcgaagtggaaaacctcaaccactgtgagtttgccctgcttcgagactttgtcatcaggacccacctccaggacctcaaggaagtgacacacaacatccactatgagacttacagggccaagcggctcaatgacaatggaggcctccctccggtgagcgtggacacagaggaaagccacgacagtaacccatgacgaccacttctctgtgtcatcacacatacccacttcacacacacacatcccaaataccaccaccaaccaccttcttcctctcaactctgtcccacaggcctgtctggtatttgtggagcatcttgtctgtgtgtgtgtgtgtgtgtgtgtgtgtgtgtgtgtgtgtgacagagagagagcgagagagcctgtgtgtgtgcatgcaggggtgaggtattttcactgccctccctggagagtcccttgtaagtttggctcctccatgcctgtccattatctgtctcctttccttgtgtcccaaaacaaagctgtttgcctcactcaggagatctgggggaggtttcatttaaaagtgctgggagcaggtgagccacaggcaactcttctctcggaacctgcacacaaactggggctatagagattctccaaggacagatggcagtggagctagacctgagtagggggcagggagttcaggacaaccctcctgtaagttgggggtggtctgggggtaaggctggggcttcctgggaaaaggaaggccatgagaaggcagagaagtaggccagagctgggttcttgcagaaagcatcagtgcctacaaatggagctccacccttcagtctgtgtcgtgttcagtgtcacaaagctaccacctgtcaccagagcctactgctgctctccactcaactggcctctgctgccaggccactgcctgtctctgcttccgactttgtcttctttctccctttccctccttccctcatacattgctttctctccctctcctgcgtgtctctgacatctctcacttccttttagatgaatctactttaggttcattcctatatttagcatttatgcccagtctacttccagaaatgactttagactgcctttcacataaaatcacaaaactacaggacagtacaaacagattgccagagaaatctgggtcaaagaaaggaataggaaagaaagtttctgtagtcaagcacctgaacaggccctgagctcacaggcagccaatgtaaagagggaaacacagtgagttatgcagttcccagtgtccagttaaaggaagcacacatgctagtcatgtgagacaaccttttattgggacatcaggttctagaactaattctaaagaagtatcagaaacaatatacataatttgtctttcttagtaatttggcttcaaagacaaatttttgaccacacctccgttttctccgtcagacttctctcccttctaagcaggcttctctgttgctccatttgcttcatacatacttgacctctcttttctattccccatcacttttgtgctgaagctaatcatatttatgtctgtctttctctacttttccctaattccctctcctcctgactcctgtagacattcccaatgatacccaccgtcatacatttaggcttttcttgcctttccctgaagccctgtatttattaatgcatatatttcccctgcttgttgtacaagtaagttactcttttcctttaatctgtaagattcatgaaattcggggccagggaaacagtttagccttagggaagggaaaacactaagtgaaactgtttacaataacctcatacaaccttctgtcccatctcctggttcagcctaggtgtttcactggtcctctatgaatcccagcacttataatcccagtcttttatcactcaggtgctaggaaaaaaaacatagactcaagacccaagattcaatggaccaggagaaaggggggcggtgatcaggtcaccagtgaccccaacctatgctctcggtctttcctggaggctgccaacccagccctcatcctcccttgctcacaaagttacagggtaggcacctgtcaggacagaacagcagcagcgctacagcccagaggttatacatttcaacagaacagggatccttggctactgtagaagcagtcctgtatggagaccttggaccagcaggggaagatctatgggcatgggaggtgggcgttggaaaggctgagtaggaatggtgcctggcacccctgaaccatgatctgagcctccctggagaaggtattttatatgtctgctgccagctgctggtctccacaccctcaaccgttctcaacccccctgcagggagaaggcctcctgggcactgtccttccacctgtgccagccaccccctgccccactgctgaatgaaggccatttcaagcgctgcttctcactccattcctctcagctgttattgctgcagggccaagccctttttagtgctgtgctcgtccagctcaccaccacagcccctctcagccctcagtaggtgggaggggccagctgcctctttaggccagttgcatcctccatttatccaaaccactcctctcctcccagtggagtggggttctgccagtacagccctactgcatcatctgcgtcagccggtcctagcccatctgcagggtgaaagaactcatcaagagctccttctgcccttgtaagcccatcccagctacttgtaaccatctctaagggcaatggcattgctccctacccattcatctgcatgagctactcttggcttccttaaagggtcaagaaagcaatttttctgcttactagattcattgagatcagctgtgtgagccccaaagtgggacaagggtgtctccttcattacttaaagatattcatgagggtgggtcactacagatgttggggagcaagggctaggatcactttttaaaaaatcaccacttgtggctgtcccagagtgcggttgtacatcctccccacctcataacgcagccactgaggaagagtggttttcctaagaagacattgctggagttgactttcttctgtccaaacaaacaaacaaaaactaaacacacacacaaacccccagaaacccacaatatgtacacgctaaggaaaaactagcacccttctgtccactcagcaataagagggatctcttcccacctaccctacctactcctacccccaacccccttccccattaatgtgagtaatgaattagcctgaccacaggtggtcactgtaggctaatggaaaatacccaagggagggcaaagccccccatcagatgcatgaatgtttgcgaatgttgactgccactgccccacacactgtgtctttatagaattcccctttgcccaccctcttcctgtctccacctggacacaacttgctcaaaggctggtgacttgtgggccattcatctacaaccaagtcctgatggagcaagaggcccacgcctaggggatgcaagaacaacccgtttcttaaatgttaccagtcccagccaatcttacggtgacattacagttaaatttcccaattgaaaacaagcaaacagacactcaaactggtcctgtaattgttgctagactttatgtgttgtacaactaaacattgctgtttgaacagtaa

SEQ ID NO: 1126 - protein, 350 aa, Homo Sapiens
MSKGLPETRTDAAMSELVPEPRPKPAVPMKPMSINSNLLGYIGIDTIIEQMRKKTMKTGFDFNIMVVGQSGLGKSTLVNTLFKSQVSRKASSWNREEKIPKTVEIKAIGHVIEEGGVKMKLTVIDTPGFGDQINNENCWEPIEKYINEQYEKFLKEEVNIARKKRIPDTRVHCCLYFISPTGHSLRPLDLEFMKHLSKVVNIIPVIAKADTMTLEEKSEFKQRVRKELEVNGIEFYPQKEFDEDLEDKTENDKIRQESMPFAVVGSDKEYQVNGKRVLGRKTPWGIIEVENLNHCEFALLRDFVIRTHLQDLKEVTHNIHYETYRAKRLNDNGGLPPVSVDTEESHDSNP

SEQ ID NO: 1127 - DNA, 2523 bp, Homo Sapiens
attactaagcatccccgtctgagtgcaagggtgtgtgttggcagtacagccccaatcttgcaaaatccttcttccaatgttcctcccctctctgtatgaaccctgtgttggggggcagaagatggaagcccttggcaagctcgatcgaaccaagctactaaattgctgagctcgttttaactgaagtgtgagaaggaggtttaaggcaagtagacaacatcctgttgttggggtgcttctctcttttttgcacatctggctgaactgggagtcaggtggttgacttgtgcctggctgcagtagcagcggcatctcccttgcacagttctcctcctcggcctgcccaagagtccaccaggccatggacgcagtggctgtgtatcatggcaaaatcagcagggaaaccggcgagaagctcctgcttgccactgggctggatggcagctatttgctgagggacagcgagagcgtgccaggcgtgtactgcctatgtgtgctgtatcacggttacatttatacataccgagtgtcccagacagaaacaggttcttggagtgctgagacagcacctggggtacataaaagatatttccggaaaataaaaaatctcatttcagcatttcagaagccagatcaaggcattgtaatacctctgcagtatccagttgagaagaagtcctcagctagaagtacacaaggtactacagggataagagaagatcctgatgtctgcctgaaagccccatgaagaaaaataaaacaccttgtactttattttctataatttaaatatatgctaagtcttatatattgtagataatacagttcggtgagctacaaatgcatttctaaagccattgtagtcctgtaatggaagcatctagcatgtcgtcaaagctgaaatggacttttgtacatagtgaggagctttgaaacgaggattgggaaaaagtaattccgtaggttattttcagttattatatttacaaatgggaaacaaaaggataatgaatactttataaaggattaatgtcaattcttgccaaatataaataaaaataatcctcagtttttgtgaaaagctccatttttagtgaaatattattttatagctactaattttaaaatgtcttgcttgattgtatggtgggaagttggctggtgtcccttgtctttgccaagttctccactagctatggtgtcataggctcttttgggatttttgaagctgtatactgtgtgctaaaacaagcactaaacaaagagtgaaggatttatgtttaattctgaaagcaaccttcttgcctagtgttctgatattggacagtaaaatccacagaccaacctggagttgaaaatcttataatttaaaatatgctctaaacatgtttatcgtatttgatgctacaggatttgaaattgtattacaaatccaatgaaatgagtttttcttttcatttacctctgccccagttgtttctactacatggaagacctcattttgaagggaaatttcagcagctgcagctcatgagtaactgatttgtaacaagcctccttttaaagtaaccctacaaaaccactggaaagtttatggttgtattattttttaaaaaaattccaagtgattgaaacctacacgagatacagaattttatgcggcattttcttctcacatttatatttttgtgattttgtgattgattatatgtcactttgctacagggctcacagaattcattcactcaacaaacataatagggcgctgagggcatagaagtaaaaacacctggtccctgctctcagttcactgtcttgttggacgagaaaacaataacgataaaagacagtgaaagaaaataacgataaaagacagtgaaagaaaataacaataaaagacaaggaaaaaataacaatgaaagttgataagtacatgataagcgaggttccccgtgtgtaggtagatctggtctttagaggcagatagataggtcagtgcaaatactctggtccatgggccatatgaaaaggctaagcttcactgtaaaataataactgggaattctggattgtgtatgggtgttggtgaacttggttttaattagtgaactgctgagagacagagctattctccatgtactggcaagacctgatttctgagcatttaatatggatgccgtgggagtacaaaagtggagtgtggcctgagtaatgcattatgggtggtttaccatttcttgaggtaaaagcatcacatgaacttgtaaaggaatttaaaaatcctactttcataataagttgcataggtttaataatttttaattatatggcttgagtttaaattgtaataggcgtaactaattttaactctataatgtgttcattctggaataatcctaaacatatgaattatgtttgcatgttcacttccaagagcctttttttgaaaaaaagctttttttgaatcatcaagtctttcacatttaaataaagtgtttgaaagctttatttacctaaaaaaaa

SEQ ID NO: 1128 - protein, 128 aa, Homo Sapiens
MDAVAVYHGKISRETGEKLLLATGLDGSYLLRDSESVPGVYCLCVLYHGYIYTYRVSQTETGSWSAETAPGVHKRYFRKIKNLISAFQKPDQGIVIPLQYPVEKKSSARSTQGTTGIREDPDVCLKAP

SEQ ID NO: 1129 - DNA, 4001 bp, Homo Sapiens
ctcctccttcccccaaccacccgcgcagtcacaaccggttcagactggccggggtgccccgcaaagagagacaagggagaaaaagacagcagggaaaaccccggggaggagaaggcgaaagagaaggtggagctcagagaagggggccggctccccagctccatgtggccgccgccgctgcgggtctgtgggggcagagggcggcggctcccggggcagcgcgtagcgggaccgattgcctaatactccggcaggggccggggccgcagctggctcggataaatagccgcccggctggcccggagctgcaggggagagcggcggccgcgatccccaccacaccaccagcccggccgcacggggcactgagccgggtgctgagcaccggaggccccgccgaggccgggactcaggacctgcagagaaacgcctcctgattttgtcttacaatggaacttaaaaagtcgcctgacggtggatggggctgggtgattgtgtttgtctccttccttactcagtttttgtgttacggatccccactagctgttggagtcctgtacatagaatggctggatgcctttggtgaaggaaaaggaaaaacagcctgggttggatccctggcaagtggagttggcttgcttgcaagtcctgtctgcagtctctgtgtctcatcttttggagcaagacctgtcacaatcttcagtggcttcatggtggctggaggcctgatgttgagcagttttgctcccaatatctactttctgtttttttcctatggcattgttgtaggtcttggatgtggtttattatacactgcaacagtgaccattacgtgccagtattttgacgatcgccgaggcctagcgcttggcctgatttcaacaggttcaagcgttggccttttcatatatgctgctctgcagaggatgctggttgagttctatggactggatggatgcttgctgattgtgggtgctttagctttaaatatattagcctgtggcagtctgatgagacccctccaatcttctgattgtcctttgcctaaaaaaatagctccagaagatctaccagataaatactccatttacaatgaaaaaggaaagaatctggaagaaaacataaacattcttgacaagagctacagtagtgaggaaaaatgcaggatcacgttagccaatggtgactggaaacaagacagcctacttcataaaaaccccacagtgacacacacaaaagagcctgaaacgtacaaaaagaaagttgcagaacagacatatttttgcaaacagcttgccaagaggaagtggcagttatataaaaactactgtggtgaaactgtggctctttttaaaaacaaagtattttcagcccttttcattgctatcttactctttgacatcggagggtttccaccttcattacttatggaagatgtagcaagaagttcaaacgtgaaagaagaagagtttattatgccacttatttccattataggcattatgacagcagttggtaaactgcttttagggatactggctgacttcaagtggattaataccttgtatctttatgttgctaccttaatcatcatgggcctagccttgtgtgcaattccatttgccaaaagctatgtcacattggcgttgctttctgggatcctagggtttcttactggtaattggtccatctttccatatgtgaccacgaagactgtgggaattgaaaaattagcccatgcctatgggatattaatgttctttgctggacttggaaatagcctaggaccacccatcgttggttggttttatgactggacccagacctatgatattgcattttattttagtggcttctgcgtcctgctgggaggttttattctgctgctggcagccttgccctcttgggatacatgcaacaagcaactccccaagccagctccaacaactttcttgtacaaagttgcctctaatgtttagaagaatattggaagacactatttttgctattttataccatatagcaacgatattttaacagattctcaagcaaattttctagagtcaagactattttctcatagcaaaatttcacaatgactgactctgaatgaattatttttttttatatatcctattttttatgtagtgtatgcgtagcctctatctcgtatttttttctatttctcctccccacaccatcaatgggactattctgttttgctgttattcactagttcttaacattgtaaaaagtttgaccagcctcagaaggctttctctgtgtaaagaagtataatttctctgccgactccatttaatccactgcaaggcacctagagagactgctcctattttaaaagtgatgcaagcatcatgataagatatgtgtgaagcccactaggaaataaatcattctcttctctatgtttgacttgctagtaaacagaagacttcaagccagccaggaaattaaagtggcgactaaaacagccttaagaattgcagtggagcaaattggtcattttttaaaaaaatatattttaacctacagtcaccagttttcattattctatttacctcactgaagtactcgcatgttgtttggtacccactgagcaactgtttcagttcctaaggtatttgctgagatgtgggtgaactccaaatggagaagtagtcactgtagactttcttcatggttgaccactccaaccttgctcacttttgcttcttggccatccactcagctgatgtttcctgggaagtgctaattttacctgtttccaaattggaaacacatttctcaatcattccgttctggcaaatgggaaacatccatttgctttgggcacagtggggatgggctgcaagttcttgcatatcctcccagtgaagcatttatttgctactatcagattttaccactatcaaatataattcaagggcagaattaaacgtgagtgtgtgtgtgtgtgtgtgtgtgtgctatgcatgctctaagtctgcatgggatatgggaatggaaaagggcaataagaaattaatacccttatgcagttgcatttaaccttaagaaaaatgtccttgggataaactccaatgtttaatacattgattttttttctaaagaaatgggttttaaactttggtatgcatcagaattccctatagatctttttgaaaatataggtacctgggtatcacacatagaacttttaattctgctggtgtaggctgttgcccaaacatctataattttactgagctcttcaagtgattctgataacacagcctggattgagaatttttataagattggcaatggaaaaacatttattcttttaaataataatttttttaaaacccaagaggtcaggggattttataaaccaatagccaagtgttctttaaataggaggcacccttcccattgtgccaaaatcatcttttcatttattttgaaatttgtatgattattttatacttgtatgttgcctttcttcgaaggcgcctgaagcactttataaacacaaatcctcacaatacctctgtgaggtaggtaaatagtacttttctatgtagtaaacctggaatatggagaatttcataacagttcattctacttaataatgcaataatggagctccaagttgtcttggacttctacaccacactcagacttctggaaagttttctgtacctcattctttagtccctgtcaaggttagtaaataaaataagtgacataaaaaaaaaaaaaactaaactacttgttgtgttgaaagttcctttttgccagttatgttcaggaaacccaataacctgaaaaagtttgactttgatgtgacatcttcatattcatcaatgctgataattgtccaaaggcatcttcactatgtctgctaaataacatccaatgtgggcgttatctgttgtctaggggatgaattttaagttacaataaaatatttttctttgttttgcaaaaaaaaaaaaaaa

SEQ ID NO: 1130 - protein, 509 aa, Homo Sapiens
MELKKSPDGGWGWVIVFVSFLTQFLCYGSPLAVGVLYIEWLDAFGEGKGKTAWVGSLASGVGLLASPVCSLCVSSFGARPVTIFSGFMVAGGLMLSSFAPNIYFLFFSYGIVVGLGCGLLYTATVTITCQYFDDRRGLALGLISTGSSVGLFIYAALQRMLVEFYGLDGCLLIVGALALNILACGSLMRPLQSSDCPLPKKIAPEDLPDKYSIYNEKGKNLEENINILDKSYSSEEKCRITLANGDWKQDSLLHKNPTVTHTKEPETYKKKVAEQTYFCKQLAKRKWQLYKNYCGETVALFKNKVFSALFIAILLFDIGGFPPSLLMEDVARSSNVKEEEFIMPLISIIGIMTAVGKLLLGILADFKWINTLYLYVATLIIMGLALCAIPFAKSYVTLALLSGILGFLTGNWSIFPYVTTKTVGIEKLAHAYGILMFFAGLGNSLGPPIVGWFYDWTQTYDIAFYFSGFCVLLGGFILLLAALPSWDTCNKQLPKPAPTTFLYKVASNV

SEQ ID NO: 1131 - DNA, 2796 bp, Homo Sapiens
ctgcggcgggggcggccccagcggatgaatgaagcggcgcgtggctgccggggaggccagagcgtggagcgctgcgcggcgcggcggccgggccctcgagacggggacggacacaccagcccctcggataccacttggccactcccgctgaggccactcccactgcgtggctgaagcctcgaggtcaccaggcggaggcgcggagatgcccctgcatcagctgggggacaagccgctcaccttccccagccccaactcagccatggaaaacgggcttgaccacaccccacccagcaggagggcatccccgggcacacccctgagccccggctccctccgctccgctgcccatagccccctggacaccagcaagcagcccctctgccagctctgggccgagaagcatggcgcccgggggacccatgaggtgcggtacgtctcggccgggcagagcgtggcgtgcggctggtgggccttcgcaccgccgtgcctgcaggtcctcaacacgcccaagggcatcctgttcttcctgtgtgcggccgcattcctgcaggggatgactgtgaatggcttcatcaacacagtcatcacctccctggagcgccgctatgacctgcacagctaccagagcgggctcatcgccagctcctacgacattgccgcctgcctctgcctcaccttcgtcagctacttcgggggctcagggcacaagccgcgctggctgggctggggcgtgctgcttatgggcacggggtcgctggtgttcgcgctgccccacttcacggctggccgctatgaggtggagttggacgcgggtgtcaggacgtgccctgccaaccccggcgcggtgtgtgcggacagcacctcgggcctgtcccgctaccagctggtcttcatgctgggccagttcctgcatggcgtgggtgccacacccctctacacgctgggcgtcacctacctggatgagaacgtcaagtccagctgctcgcccgtctacattgccatcttctacacagcggccatcctgggcccagctgccggctacctgattggaggtgccctgctgaatatctacacggaaatgggccgacggacggagctgaccaccgagagcccactgtgggtcggcgcctggtgggtcggcttcctgggctctggggccgctgctttcttcaccgccgttcccatccttggttaccctcggcagctgccaggctcccagcgctacgcggtcatgagagcggcggaaatgcaccagttgaaggacagcagccgtggggaggcgagcaacccggactttgggaaaaccatcagagacctgcctctctccatctggctcctgctgaagaaccccacgttcatcctgctctgcctggccggggccaccgaggccactctcatcaccggcatgtccacgttcagccccaagttcttggagtcccagttcagcctgagtgcctcagaagctgccaccttgtttgggtacctggtggtgccagcgggtggtggcggcaccttcctgggcggcttctttgtgaacaagctcaggctccggggctccgcggtcatcaagttctgcctgttctgcaccgttgtcagcctgctgggcatcctcgtcttctcactgcactgccccagtgtgcccatggcgggcgtcacagccagctacggcgggagcctcctgcccgaaggccacctgaacctaacggctccctgcaacgctgcctgcagctgccagccagaacactacagccctgtgtgcggctcggacggcctcatgtacttctcactgtgccacgcagggtgccctgcagccacggagacgaatgtggacggccagaaggtgtaccgagactgtagctgtatccctcagaatctttcctctggttttggccatgccactgcagggaaatgcacttcaacttgtcagagaaagcccctccttctggttttcatattcgttgtaattttctttacattcctcagcagcattcctgcactaacggcaactctacgatgtgtccgtgaccctcagagatcctttgccctgggaatccagtggattgtagttagaatactagggggcatcccggggcccatcgccttcggctgggtgatcgacaaggcctgtctgctgtggcaggaccagtgtggccagcagggctcctgcttggtgtaccagaattcggccatgagccgctacatactcatcatggggctcctgtacaaggtgctgggcgtcctcttctttgccatagcctgcttcttatacaagcccctgtcggagtcttcagatggcctggaaacttgtctgcccagccagtcctcagcccctgacagtgccacagatagccagctccagagcagcgtctgaccaccgcccgcgcccacccggccacggcgggcactcagcatttcctgatgacagaacagtgccgttgggtgatgcaatcacacgggaacttctatttgacctgcaaccttctacttaacctgtggtttaaagtcggctgtgacctcctgtccccagagctgtacggccctgcagtgggtgggaggaacttgcataaatatatatttatggacacacagtttgcatcagaacgtgtttatagaatgtgttttatacccgatcgtgtgtggtgtgcgtgaggacaaactccgcaggggctgtgaatcccactgggagggcggtgggcctgcagcctgaggaaggcttgtgtgtcctcagttaaaactgtgcatatcgaaatatattttgttatttaagcctgcgaaaaaaaaaaaaaaaaaaaa

SEQ ID NO: 1132 - protein, 722 aa, Homo Sapiens
MPLHQLGDKPLTFPSPNSAMENGLDHTPPSRRASPGTPLSPGSLRSAAHSPLDTSKQPLCQLWAEKHGARGTHEVRYVSAGQSVACGWWAFAPPCLQVLNTPKGILFFLCAAAFLQGMTVNGFINTVITSLERRYDLHSYQSGLIASSYDIAACLCLTFVSYFGGSGHKPRWLGWGVLLMGTGSLVFALPHFTAGRYEVELDAGVRTCPANPGAVCADSTSGLSRYQLVFMLGQFLHGVGATPLYTLGVTYLDENVKSSCSPVYIAIFYTAAILGPAAGYLIGGALLNIYTEMGRRTELTTESPLWVGAWWVGFLGSGAAAFFTAVPILGYPRQLPGSQRYAVMRAAEMHQLKDSSRGEASNPDFGKTIRDLPLSIWLLLKNPTFILLCLAGATEATLITGMSTFSPKFLESQFSLSASEAATLFGYLVVPAGGGGTFLGGFFVNKLRLRGSAVIKFCLFCTVVSLLGILVFSLHCPSVPMAGVTASYGGSLLPEGHLNLTAPCNAACSCQPEHYSPVCGSDGLMYFSLCHAGCPAATETNVDGQKVYRDCSCIPQNLSSGFGHATAGKCTSTCQRKPLLLVFIFVVIFFTFLSSIPALTATLRCVRDPQRSFALGIQWIVVRILGGIPGPIAFGWVIDKACLLWQDQCGQQGSCLVYQNSAMSRYILIMGLLYKVLGVLFFAIACFLYKPLSESSDGLETCLPSQSSAPDSATDSQLQSSV

SEQ ID NO: 1133 - DNA, 1181 bp, Homo Sapiens
aaaaagccagctgggctcctgagtccggcgggtacttggagaacttactacgtctagctggaggattgtaaatgcaccaatcagcatgctgtgtctagctcaagaactcaagctccatgaggagatgtttcattgtcgagagcagtcatgatgccctgcactccacacaatgcaacagagtgaaagagcaggttctgcttctttggtgtagtcctgaagcttcctaagaaacttcacatcaggtgatggataggagcaaccctgtaaaaccagccttagactatttttcaaacaggctggtgaattaccagatctccgtcaagtgcagtaaccagttcaagttggaagtgtgtcttttgaatgcagaaaacaaagtcgtggacaaccaggctgggacccagggccagctgaaggtgctgggtgccaacctctggtggccgtacctgatgcacgaacaccccgcctacctgtactcgtgggaggatggtgattgctcacaccaaagccttggacccctcccagcctgtgacctttgggaccaactccacctacgcagcagacaagggggctctgtatgtggatgtgatccgtgtgaacagctactactcttggtatcgcaactacgggcacctggagttgattcagctgcagctggccgcccagtttgagaattggtgtaagacatcacaatcccattattcagagcgcgtatggagtggaaacgcttgtagggcttcaccaggatccacctctgatgttcagtgaagaggaccagaaaagtctgctagagcagtaccatctgggtctggatcaaaaacgcagaaaatacgtggttggagagctcatctggaattttgccgatttcatgactaaccagtgtgtcagtttcttggtcgggaatgaaaatagtgccaacctgtgataccttcactctaattttactttctgaggaagttttctgtaatagttatttggtgataattattaatactgatgtgaatttcttcggagtaagaaatcctcagaggaaattacccagtatatccaaagctacaagggatttgttgacataacgggagaacattttgtgaattcctgggtccagagagaattacctatggcatcagcttattgcaatgacagcatctttgcttacgaagaactacggctggactctttta

SEQ ID NO: 1134 - protein, 140 aa, Homo Sapiens
MDRSNPVKPALDYFSNRLVNYQISVKCSNQFKLEVCLLNAENKVVDNQAGTQGQLKVLGANLWWPYLMHEHPAYLYSWEDGDCSHQSLGPLPACDLWDQLHLRSRQGGSVCGCDPCEQLLLLVSQLRAPGVDSAAAGRPV

SEQ ID NO: 1135 - DNA, 2397 bp, Homo Sapiens
cacgcgcccctcctccgcatctgagcgggggagcggcggcccccagctgaatgggcgcgagagcggcgctgggggcgggtgggggcgcggggtaccgggctggcggccggccggcgccccctcattagtatgcggacgaaggcggcgggctgcgcggagcggcgtcccctgcagccgcggaccgaggcagcggcggcacctgccggccgagcaatgccaagtgagtacacctatgtgaaactgagaagtgattgctcgaggccttccctgcaatggtacacccgagctcaaagcaagatgagaaggcccagcttgttattaaaagacatcctcaaatgtacattgcttgtgtttggagtgtggatcctttatatcctcaagttaaattatactactgaagaatgtgacatgaaaaaaatgcattatgtggaccctgaccatgtaaagagagctcagaaatatgctcagcaagtcttgcagaaggaatgtcgtcccaagtttgccaagacatcaatggcgctgttatttgagcacaggtatagcgtggacttactcccttttgtgcagaaggcccccaaagacagtgaagctgagtccaagtacgatcctccttttgggttccggaagttctccagtaaagtccagaccctcttggaactcttgccagagcacgacctccctgaacacttgaaagccaagacctgtcggcgctgtgtggttattggaagcggaggaatactgcacggattagaactgggccacaccctgaaccagttcgatgttgtgataaggttaaacagtgcaccagttgagggatattcagaacatgttggaaataaaactactataaggatgacttatccagagggcgcaccactgtctgaccttgaatattattccaatgacttatttgttgctgttttatttaagagtgttgatttcaactggcttcaagcaatggtaaaaaaggaaaccctgccattctgggtacgactcttcttttggaagcaggtggcagaaaaaatcccactgcagccaaaacatttcaggattttgaatccagttatcatcaaagagactgcctttgacatccttcagtactcagagcctcagtcaaggttctggggccgagataagaacgtccccacaatcggtgtcattgccgttgtcttagccacacatctgtgcgatgaagtcagtttggcgggttttggatatgacctcaatcaacccagaacacctttgcactacttcgacagtcaatgcatggctgctatgaactttcagaccatgcataatgtgacaacggaaaccaagttcctcttaaagctggtcaaagagggagtggtgaaagatctcagtggaggcattgatcgtgaattttgaacacagaaaacctcagttgaaaatgcaactctaactctgagagctgtttttgacagccttcttgatgtatttctccatcctgcagatactttgaagtgcagctcatgtttttaacttttaatttaaaaacacaaaaaaaattttagctcttcccactttttttttcctatttatttgaggtcagtgtttgtttttgcacaccattttgtaaatgaaacttaagaattgaattggaaagacttctcaaagagaattgtatgtaacgatgttgtattgatttttaagaaagtaatttaatttgtaaaacttctgctcgtttacactgcacattgaatacaggtaactaattggaaggagaggggaggtcactcttttgatggtggccctgaacctcattctggttccctgctgcgctgcttggtgtgacccacggaggatccactcccaggatgacgtgctccgtagctctgctgctgatactgggtctgcgatgcagcggcgtgaggcctgggctggttggagaaggtcacaacccttctctgttggtctgccttctgctgaaagactcgagaaccaaccagggaagctgtcctggaggtccctggtcggagagggacatagaatctgtgacctctgacaactgtgaagccaccctgggctacagaaaccacagtcttcccagcaattattacaattcttgaattccttggggattttttactgccctttcaaagcacttaagtgttagatctaacgtgttccagtgtctgtctgaggtgacttaaaaaatcagaacaaaacttctattatccagagtcatgggagagtacaccctttccaggaataatgttttgggaaacactgaaatgaaatcttcccagtattataaattgtgtatttaaaaaaaagaaacttttctgaatgcctacctggcggtgtataccaggcagtgtgccagtttaaaaagatgaaaaagaataaaaacttttgaggaacaaaaaaaaaaaaaaa

SEQ ID NO: 1136 - protein, 418 aa, Homo Sapiens
MRTKAAGCAERRPLQPRTEAAAAPAGRAMPSEYTYVKLRSDCSRPSLQWYTRAQSKMRRPSLLLKDILKCTLLVFGVWILYILKLNYTTEECDMKKMHYVDPDHVKRAQKYAQQVLQKECRPKFAKTSMALLFEHRYSVDLLPFVQKAPKDSEAESKYDPPFGFRKFSSKVQTLLELLPEHDLPEHLKAKTCRRCVVIGSGGILHGLELGHTLNQFDVVIRLNSAPVEGYSEHVGNKTTIRMTYPEGAPLSDLEYYSNDLFVAVLFKSVDFNWLQAMVKKETLPFWVRLFFWKQVAEKIPLQPKHFRILNPVIIKETAFDILQYSEPQSRFWGRDKNVPTIGVIAVVLATHLCDEVSLAGFGYDLNQPRTPLHYFDSQCMAAMNFQTMHNVTTETKFLLKLVKEGVVKDLSGGIDREF

SEQ ID NO: 1137 - DNA, 3909 bp, Homo Sapiens
gagcgagagtgtgtcgagtgagtgtgcgtctgtgtgtcccggcgagggtgcgcgctcggcgccgggagcgcggccagccgagtccggaggcatcgggaggtcgagagccgccgggaccccagctctgcgttcactgccccgtccggagctggacttcggggccggggccggggccgtgcgccggggacaggcagggccgggtcgcgggccgcgcgtcccccaggccggagatctgcgagtgaagagggacgagggaaaagaaacaaagccacagacgcaacttgagactcccgcatcccaaaagaagcaccagatcagcaaaaaaagaagatgggccccccgagcctcgtgctgtgcttgctgtccgcaactgtgttctccctgctgggtggaagctcggccttcctgtcgcaccaccgcctgaaaggcaggtttcagagggaccgcaggaacatccgccccaacatcatcctggtgctgacggacgaccaggatgtggagctgggttccatgcaggtgatgaacaagacccggcgcatcatggagcagggcggggcgcacttcatcaacgccttcgtgaccacacccatgtgctgcccctcacgctcctccatcctcactggcaagtacgtccacaaccacaacacctacaccaacaatgagaactgctcctcgccctcctggcaggcacagcacgagagccgcacctttgccgtgtacctcaatagcactggctaccggacagctttcttcgggaagtatcttaatgaatacaacggctcctacgtgccacccggctggaaggagtgggtcggactccttaaaaactcccgcttttataactacacgctgtgtcggaacggggtgaaagagaagcacggctccgactactccaaggattacctcacagacctcatcaccaatgacagcgtgagcttcttccgcacgtccaagaagatgtacccgcacaggccagtcctcatggtcatcagccatgcagccccccacggccctgaggattcagccccacaatattcacgcctcttcccaaacgcatctcagcacatcacgccgagctacaactacgcgcccaacccggacaaacactggatcatgcgctacacggggcccatgaagcccatccacatggaattcaccaacatgctccagcggaagcgcttgcagaccctcatgtcggtggacgactccatggagacgatttacaacatgctggttgagacgggcgagctggacaacacgtacatcgtatacaccgccgaccacggttaccacatcggccagtttggcctggtgaaagggaaatccatgccatatgagtttgacatcagggtcccgttctacgtgaggggccccaacgtggaagccggctgtctgaatccccacatcgtcctcaacattgacctggcccccaccatcctggacattgcaggcctggacatacctgcggatatggacgggaaatccatcctcaagctgctggacacggagcggccggtgaatcggtttcacttgaaaaagaagatgagggtctggcgggactccttcttggtggagagaggcaagctgctacacaagagagacaatgacaaggtggacgcccaggaggagaactttctgcccaagtaccagcgtgtgaaggacctgtgtcagcgtgctgagtaccagacggcgtgtgagcagctgggacagaagtggcagtgtgtggaggacgccacggggaagctgaagctgcataagtgcaagggccccatgcggctgggcggcagcagagccctctccaacctcgtgcccaagtactacgggcagggcagcgaggcctgcacctgtgacagcggggactacaagctcagcctggccggacgccggaaaaaactcttcaagaagaagtacaaggccagctatgtccgcagtcgctccatccgctcagtggccatcgaggtggacggcagggtgtaccacgtaggcctgggtgatgccgcccagccccgaaacctcaccaagcggcactggccaggggcccctgaggaccaagatgacaaggatggtggggacttcagtggcactggaggccttcccgactactcagccgccaaccccattaaagtgacacatcggtgctacatcctagagaacgacacagtccagtgtgacctggacctgtacaagtccctgcaggcctggaaagaccacaagctgcacatcgaccacgagattgaaaccctgcagaacaaaattaagaacctgagggaagtccgaggtcacctgaagaaaaagcggccagaagaatgtgactgtcacaaaatcagctaccacacccagcacaaaggccgcctcaagcacagaggctccagtctgcatcctttcaggaagggcctgcaagagaaggacaaggtgtggctgttgcgggagcagaagcgcaagaagaaactccgcaagctgctcaagcgcctgcagaacaacgacacgtgcagcatgccaggcctcacgtgcttcacccacgacaaccagcactggcagacggcgcctttctggacactggggcctttctgtgcctgcaccagcgccaacaataacacgtactggtgcatgaggaccatcaatgagactcacaatttcctcttctgtgaatttgcaactggcttcctagagtactttgatctcaacacagacccctaccagctgatgaatgcagtgaacacactggacagggatgtcctcaaccagctacacgtacagctcatggagctgaggagctgcaagggttacaagcagtgtaacccccggactcgaaacatggacctgggacttaaagatggaggaagctatgagcaatacaggcagtttcagcgtcgaaagtggccagaaatgaagagaccttcttccaaatcactgggacaactgtgggaaggctgggaaggttaagaaacaacagaggtggacctccaaaaacatagaggcatcacctgactgcacaggcaatgaaaaaccatgtgggtgatttccagcagacctgtggtattggccaggaggcctgagaaagcaagcacgcactctcagtcaacatgacagattctggaggataaccagcaggagcagagataacttcaggaagtccatttttgcccctgcttttgctttggattatacctcaccagctgcacaaaatgcattttttcgtatcaaaaagtcaccactaaccctcccccagaagctcacaaaggaaaacggagagagcgagcgagagagatttccttggaaatttctcccaagggcgaaagtcattggaatttttaaatcataggggaaaagcagtcctgttctaaatcctcttattcttttggtttgtcacaaagaaggaactaagaagcaggacagaggcaacgtggagaggctgaaaacagtgcagagacgtttgacaatgagtcagtagcacaaaagagatgacatttacctagcactataaaccctggttgcctctgaagaaactgccttcattgtatatatgtgactatttacatgtaatcaacatgggaacttttaggggaacctaataagaaatcccaattttcaggagtggtggtgtcaataaacgctctgtggccagtgtaaaagaaaatccctcgcagttgtggacatttctgttcctgtccagataccatttctcctagtatttctttgttatgtcccagaactgatgttttttttttaaggtactgaaaagaaatgaagttgatgtatgtcccaagttttgatgaaactgtatttgtaaaaaaaattttgtagtttaagtattgtcatacagtgttcaaaaccccagccaatgaccagcagttggtatgaagaacctttgacattttgtaaaaggccatttcttgggaaaaaaaaaaa

SEQ ID NO: 1138 - protein, 870 aa, Homo Sapiens
MGPPSLVLCLLSATVFSLLGGSSAFLSHHRLKGRFQRDRRNIRPNIILVLTDDQDVELGSMQVMNKTRRIMEQGGAHFINAFVTTPMCCPSRSSILTGKYVHNHNTYTNNENCSSPSWQAQHESRTFAVYLNSTGYRTAFFGKYLNEYNGSYVPPGWKEWVGLLKNSRFYNYTLCRNGVKEKHGSDYSKDYLTDLITNDSVSFFRTSKKMYPHRPVLMVISHAAPHGPEDSAPQYSRLFPNASQHITPSYNYAPNPDKHWIMRYTGPMKPIHMEFTNMLQRKRLQTLMSVDDSMETIYNMLVETGELDNTYIVYTADHGYHIGQFGLVKGKSMPYEFDIRVPFYVRGPNVEAGCLNPHIVLNIDLAPTILDIAGLDIPADMDGKSILKLLDTERPVNRFHLKKKMRVWRDSFLVERGKLLHKRDNDKVDAQEENFLPKYQRVKDLCQRAEYQTACEQLGQKWQCVEDATGKLKLHKCKGPMRLGGSRALSNLVPKYYGQGSEACTCDSGDYKLSLAGRRKKLFKKKYKASYVRSRSIRSVAIEVDGRVYHVGLGDAAQPRNLTKRHWPGAPEDQDDKDGGDFSGTGGLPDYSAANPIKVTHRCYILENDTVQCDLDLYKSLQAWKDHKLHIDHEIETLQNKIKNLREVRGHLKKKRPEECDCHKISYHTQHKGRLKHRGSSLHPFRKGLQEKDKVWLLREQKRKKKLRKLLKRLQNNDTCSMPGLTCFTHDNQHWQTAPFWTLGPFCACTSANNNTYWCMRTINETHNFLFCEFATGFLEYFDLNTDPYQLMNAVNTLDRDVLNQLHVQLMELRSCKGYKQCNPRTRNMDLGLKDGGSYEQYRQFQRRKWPEMKRPSSKSLGQLWEGWEG

SEQ ID NO: 1139 - DNA, 2935 bp, Homo Sapiens
atccccgcctcccctcctgcccaggtgactgactaatccgccgccttcaggagacagaattggccaaggcctgaaggccccggagtgcaccagcggcatgtacaaagagaccgtctactccgccttcaatctgctcatgcattacccacccccctcgggagcagggcagcacccccagccgcagcccccgctgcacaaggccaatcagcccccccacggtgtcccccaactctctctctacgaacatttcaacagcccacatcccacccctgcacctgcggacatcagccagaagcaagttcacaggcctctgcagacccctgacctctctggcttctactccctgacctcaggcagcatggggcagctcccccacactgtgagctggttcacccacccatccttgatgctaggttctggtgtacctggtcacccagcagccatcccccacccggccattgtgcccccctcagggaagcaggagctgcagcccttcgaccgcaacctgaagacacaagcagagtccaaggcagagaaggaggccaagaagccaaccatcaagaagcccctcaatgccttcatgctgtacatgaaggagatgagagccaaggtcattgcagagtgcacacttaaggagagcgctgccatcaaccagatcctgggccgcaggtggcacgcgctgtcgcgagaagagcaggccaagtactatgagctggcccgcaaggagaggcagctgcacatgcagctatacccaggctggtcagcgcgggacaactacgggaagaagaagaggcggtcgagggaaaagcaccaagaatccaccacagaccctggctcgcctaagaaatgccgtgctcgctttggcctcaaccagcagacggattggtgtggtccgtgcagataactctcttcactattcctaggaggaaaaagaaatgcattcggtacttacccggagaaggccgctgccccagccccgttccttccgatgacagtgctctaggctgccccgggtccccagctccccaggactcaccctcataccatctgctgccccgcttccccacagaactgcttactagccctgcggagccggcacctacatccccaggtctctccactgctctcagcctcccaaccccagggcccccacaggccccccgcagcaccctgcagagcacacaggtacagcaacaggaatctcagagacaggtggcctagcaggcacaggacacctggccgcctccaggagcctaccccctgaaagtgacagagacccagatctcatggaaactggccaggggtcctgttaacgtcatctcagggtccagaccctgaagatttcagaggctgcaggacttctgcctgaacctggggtcatcgattcaaactgctccaagtggtgggaatcagatctgtcttgatgtgtcatctaattaagggaatcccttgtacctatggctgcctgcatctattctttgtaccatctgtcttgccagccagaagcctctgcctccctagcttttctgctataggtcagagatgggctgaactgagcctagctaccttctctacccatctcccccatcccccactgccacaccctccccattcagacacttcatggaccaagaatgagctggtttgtcaaacaacatgtgagcatggtcacaagcacaaagctcaagatgacagctcttctaaggaaatggagaagctctgtttataaaaacaaaaacaaaaccagctgctactcataagttggaccagaggaagccccttactatgatctcaggagcttgcaagaagcaggaaggggaatggaataggttaagtttaggcctatcaacctaagcaacagaaataatctgacactaccttatcaggcaaattggggaggggagggtgtatctagctctagttcaaattatttggaagtgttccctgagaaacccaccagcctaagaagctctggccccaggcttgtcactagcagctgcagtcaacagttcaaagaagtcatggcccaaatccagtgtgcacccctccccattcacagagcctttttcacaattccatttccagttcatctatggcagtccagccagctcctgggcagcttgagagggcaaacccaaaacctcatgacagccagagcctgtctttcagcattcagtccgcctggccggctccagtttccccatggggctgcgggacagaggaccattacaactagatcaaggagcccagaaaacctccagtagtggacaacaggttttcaccatagcctacgttaacccatttttgagccaagcttcaaccctcagccttgaaaaacaagtctttaatttaatttttgttttttgcctaaatccaaagaaaaagggctgccgggccaggcgcggtggctcacgcctgtaatcccagcactttggcaggccgaggcaggtggatcacctgacgtcagtagtttgagaccagcctggccaacatggtgaaaccctgtatctactaaaaatacaaaaattagccggacgtggtggtgcgcgcatgtaatcccagctactcgggaggctgaggcggaagaatcacttgaacccgggaggcggaggttccagtgagccgagatggcgctattgcactccagtctgggtaacagggagactgcatctcaaaaaaaaaaaaaaaaaaaaaaaagggctgtccatgtattcacacacccctcaaaaaaagcctttagttcctactttagccactggtttctcagaatccaaagatcacatattctagtgtaacactgcaagaagtcttgagaaaaagattattgtagtgttcaaaatatttttgtattgttaatgcatcatcatagaaaaacttttaaacatgagaataaagatactttttactgggtttgtttttcaaagcctgaaaaaaa

SEQ ID NO: 1140 - protein, 268 aa, Homo Sapiens
MYKETVYSAFNLLMHYPPPSGAGQHPQPQPPLHKANQPPHGVPQLSLYEHFNSPHPTPAPADISQKQVHRPLQTPDLSGFYSLTSGSMGQLPHTVSWFTHPSLMLGSGVPGHPAAIPHPAIVPPSGKQELQPFDRNLKTQAESKAEKEAKKPTIKKPLNAFMLYMKEMRAKVIAECTLKESAAINQILGRRWHALSREEQAKYYELARKERQLHMQLYPGWSARDNYGKKKRRSREKHQESTTDPGSPKKCRARFGLNQQTDWCGPCR

SEQ ID NO: 1141 - DNA, 1047 bp, Homo Sapiens
cccacttctccagccagcgccccagccctcccgccgcccgctcgcaggtcccgaggagcgcagactgtgtccctgacaatgggaacagccgacagtgatgagatggccccggaggccccacagcacacccacatcgatgtgcacatccaccaggagtctgccctggccaagctcctgctcacctgctgctctgcgctgcggccccgggccacccaggccaggggcagcagccggctgctggtggcctcgtgggtgatgcagatcgtgctggggatcttgagtgcagtcctaggaggatttttctacatccgcgactacaccctcctcgtcacctcgggagctgccatctggacaggggctgtggctgtgctggctggagctgctgccttcatttacgagaaacggggtggtacatactgggccctgctgaggactctgctaacgctggcagctttctccacagccatcgctgccctcaaactttggaatgaagatttccgatatggctactcttattacaacagtgcctgccgcatctccagctcgagtgactggaacactccagcccccactcagagtccagaagaagtcagaaggctacacctatgtacctccttcatggacatgctgaaggccttgttcagaacccttcaggccatgctcttgggtgtctggattctgctgcttctggcatctctgacccctctgtggctgtactgctggagaatgttcccaaccaaagggaaaagagaccagaaggaaatgttggaagtgagtggaatctagccatgcctctcctgattattagtgcctggtgcttctgcaccgggcgtccctgcatctgactgctggaagaagaaccagactgaggaaaagaggctcttcaacagccccagttatcctggccccatgaccgtggccacagccctgctccagcagcacttgcccattccttacaccccttccccatcctgctccgcttcatgtcccctcctgagtagtcatgtgataataaactctcatgttattgttcccaggaaaaaaaaa

SEQ ID NO: 1142 - protein, 235 aa, Homo Sapiens
MGTADSDEMAPEAPQHTHIDVHIHQESALAKLLLTCCSALRPRATQARGSSRLLVASWVMQIVLGILSAVLGGFFYIRDYTLLVTSGAAIWTGAVAVLAGAAAFIYEKRGGTYWALLRTLLTLAAFSTAIAALKLWNEDFRYGYSYYNSACRISSSSDWNTPAPTQSPEEVRRLHLCTSFMDMLKALFRTLQAMLLGVWILLLLASLTPLWLYCWRMFPTKGKRDQKEMLEVSGI

SEQ ID NO: 1143 - DNA, 1564 bp, Homo Sapiens
gaagcacatctggacagctgtgcggcctccttgcgggccgacgtcagccgagcacgtcccccacgtcctctccttctcgccacttattatttattcgttttcccaaagaagcgactagggacccaagtttaaaaattcctccccccactcaatgcgagacgtggccagatcccatccaacacacggtttaattttcatggggctctgggatcaaaagaacagaaacagcaacaacaaaagcccagccgctgtctgattttaagctggcaaagtgggaaaaataaagtgttgagtaaacagaccaagttggatcatggggaatttcagaggtcatgccctccctggaaccttcttttttattattggtctttggtggtgtacaaagagtattctgaagtatatctgcaaaaagcaaaagcgaacctgctatcttggttccaaaacattattctatcgattggaaattttggagggaattacaatagttggcatggctttaactggcatggctggggagcagtttattcctggagggccccatctgatgttatatgactataaacaaggtcactggaatcaactcctgggctggcatcatttcaccatgtatttcttctttgggctgttgggtgtggcagatatcttatgtttcaccatcagttcacttcctgtgtccttaaccaagttaatgttgtcaaatgccttatttgtggaggcctttatcttctacaaccacactcatggccgggaaatgctggacatctttgtgcaccagctgctggttttggtcgtctttctgacaggcctcgttgccttcctagagttccttgttcggaacaatgtacttctggagctattgcggtcaagtctcattctgcttcaggggagctggttctttcagattggatttgtcctgtatccccccagtggaggtcctgcatgggatctgatggatcatgaaaatattttgtttctcaccatatgcttttgttggcattatgcagtaaccattgtcatcgttggaatgaattatgctttcattacctggttggttaaatctagacttaagaggctctgctcctcagaagttggacttctgaaaaatgctgaacgagaacaagaatcagaagaagaaatgtgactttgatgagcttccagtttttctagataaaccttttcttttttacattgttcttggttttgtttctcgatcttttgtttggagaacagctggctaaggatgactctaagtgtactgtttgcatttccaatttggttaaagtatttgaatttaaatattttctttttagctttgaaaatattttgggtgatactttcattttgcacatcatgcacatcatggtattcaggggctagagtgatttttttccagattatctaaagttggatgcccacactatgaaagaaatatttgttttatttgccttatagatatgctcaaggttactgggcttgctactatttgtaactccttgaccatggaattatacttgtttatcttgttgctgcaatgagaaataaatgaatgtatgtattttggtgc

SEQ ID NO: 1144 - protein, 275 aa, Homo Sapiens
MGNFRGHALPGTFFFIIGLWWCTKSILKYICKKQKRTCYLGSKTLFYRLEILEGITIVGMALTGMAGEQFIPGGPHLMLYDYKQGHWNQLLGWHHFTMYFFFGLLGVADILCFTISSLPVSLTKLMLSNALFVEAFIFYNHTHGREMLDIFVHQLLVLVVFLTGLVAFLEFLVRNNVLLELLRSSLILLQGSWFFQIGFVLYPPSGGPAWDLMDHENILFLTICFCWHYAVTIVIVGMNYAFITWLVKSRLKRLCSSEVGLLKNAEREQESEEEM

SEQ ID NO: 1145 - DNA, 2267 bp, Homo Sapiens
acttagatgataccagagagcaagagagaggaactggggtttgcgaaccttgtggctttgtctgtttcctgtttcagcaaggctgctgtgcaaaaagaaagacggtaccaagaagggacgtgttaatggggcccagacctatggattgaaagcgtgtgctttacccatctgctgtcttgctccatctgagaccagagccaagatctgcccaggactggaatgctttcccgagtggcttgagttggagcctgggactaggagcagccttattgaggtacaattcatgtgcttgtgggtttggatggcacaatctgtgtctgggctaaggaaagcagacttggcaccaacattaaccctgacagatccaggcatctattccaggaactggaagccaagcgcaacaggtgcttggaggtcatcatgatcagcccagaccccaggccctcccctggcttggcccggtgggctgagagctatgaggccaagtgtgagcgcaggcaagagatccgtgaaagccgccgctgccgtcccaatgtgaccacttgccgccaggtggggaagacgctgaggatccaacagagagagcagctccagagagctcgactgcagcagttcttcaggaggaggaacctggagctagaggagaagggcaaagcgcagcatccccaggccagggagcaagggccctccaggcggccaggacaggtgactgtcctcaaggaacccttgtcttgtgccagaaggatttcttctcccagagagcaggtgacaggcaccagctctgaagtctttccagcccagcatcctcctccctcaggcatctgcagggatctgtctgaccacctctcctcacaggctgggggccttcctccacaggacactcccatcaagaagccacccaaacaccaccgtggtactcagacaaaggcagaaggaccaacaattaagaacgatgccagtcagcaaaccaattacggagttgcagttctggataaggaaatcatccagctttctgattacctcaaagaggccctacaaagggagctggtcctaaaacagaaaatggtgattctccaagacctactgtccactctgattcaggcctctgacagctcttggaagggacagcttaatgaagacaaactgaaggggaaactgagatccttagaaaaccagctatacacctgtacccagaaatactccccttggggaatgaaaaaagtactactggagatggaagaccagaaaaacagctatgagcagaaggccaaggagtcactgcagaaagtgctggaggagaaaatgaatgcagagcagcaactacagagcacacagcgatccctggccctggcagagcagaagtgtgaagagtggaggagccagtatgaggctctgaaggaggactggaggacccttgggacccagcacagggagctggagagccaactccacgtgcttcagtccaaactgcagggagcagatagcagggacttacagatgaaccaggccctgcgatttttggaaaatgagcaccagcaactgcaggccaagattgaatgcctgcaaggggacagagacctgtgcagcttggatacccaggacctacaagatcaactaaaaaggtcagaggcagagaaactcaccctggtgaccagagtacagcagttgcagggtttgcttcaaaatcaatccttacagcttcaagaacaggagaaactcttaacaaagaaagatcaggctttgcccgtgtggagtccaaagtccttccctaacgaagtggagcctgagggtacagggaaggagaaagactgggatctcagagaccagctgcaaaagaagactttgcagctccaggccaaggaaaaggagtgcagagaactgcattcagaattagacaacctcagtgacgagtatctctcctgcctgcgtaagctgcagcactgtcgagaagagctgaaccagagccagcagctgcctcccagaaggcaatgtgggcgatggctcccagtgctgatggtggtgattgctgcagcactggcagtgttcctggccaataaagacaacctgatgatctgaataatttgtgacaactgccttgggtgaaaatcagaagcaagcaactcagcgaaaaactcagaaggtttgggtacattacagcttgggttttccaactgacttaggatttctgactttttattaatttcttaacctactgtaaataaacttcacctgaccagattgttcctcagaaaaaaaaaaaaaaaaaa

SEQ ID NO: 1146 - protein, 551 aa, Homo Sapiens
MISPDPRPSPGLARWAESYEAKCERRQEIRESRRCRPNVTTCRQVGKTLRIQQREQLQRARLQQFFRRRNLELEEKGKAQHPQAREQGPSRRPGQVTVLKEPLSCARRISSPREQVTGTSSEVFPAQHPPPSGICRDLSDHLSSQAGGLPPQDTPIKKPPKHHRGTQTKAEGPTIKNDASQQTNYGVAVLDKEIIQLSDYLKEALQRELVLKQKMVILQDLLSTLIQASDSSWKGQLNEDKLKGKLRSLENQLYTCTQKYSPWGMKKVLLEMEDQKNSYEQKAKESLQKVLEEKMNAEQQLQSTQRSLALAEQKCEEWRSQYEALKEDWRTLGTQHRELESQLHVLQSKLQGADSRDLQMNQALRFLENEHQQLQAKIECLQGDRDLCSLDTQDLQDQLKRSEAEKLTLVTRVQQLQGLLQNQSLQLQEQEKLLTKKDQALPVWSPKSFPNEVEPEGTGKEKDWDLRDQLQKKTLQLQAKEKECRELHSELDNLSDEYLSCLRKLQHCREELNQSQQLPPRRQCGRWLPVLMVVIAAALAVFLANKDNLMI

SEQ ID NO: 1147 - DNA, 1059 bp, Homo Sapiens
gcagcgcctgacatgcctgatcctctcttttctgcagttcaagggaaagacgagatcttgcacaaggcactctgcttctgcccttggctggggaagggtggcatggagcctctccggctgctcatcttactctttgtcacagagctgtccggagcccacaacaccacagtgttccagggcgtggcgggccagtccctgcaggtgtcttgcccctatgactccatgaagcactgggggaggcgcaaggcctggtgccgccagctgggagagaagggcccatgccagcgtgtggtcagcacgcacaacttgtggctgctgtccttcctgaggaggtggaatgggagcacagccatcacagacgataccctgggtggcactctcaccattacgctgcggaatctacaaccccatgatgcgggtctctaccagtgccagagcctccatggcagtgaggctgacaccctcaggaaggtcctggtggaggtgctggcagaccccctggatcaccgggatgctggagatctctggttccccggggagtctgagagcttcgaggatgcccatgtggagcacagcatctccaggagcctcttggaaggagaaatccccttcccacccacttccatccttctcctcctggcctgcatctttctcatcaagattctagcagccagcgccctctgggctgcagcctggcatggacagaagccagggacacatccacccagtgaactggactgtggccatgacccagggtatcagctccaaactctgccagggctgagagacacgtgaaggaagatgatgggaggaaaagcccaggagaagtcccaccagggaccagcccagcctgcatacttgccacttggccaccaggactccttgttctgctctggcaagagactactctgcctgaacactgcttctcctggaccctggaagcagggactggttgagggagtggggaggtggtaagaacacctgacaacttctgaatattggacattttaaacacttacaaataaatccaagactgtcatatttagctggaaaaaaaaa

SEQ ID NO: 1148 - protein, 230 aa, Homo Sapiens
MEPLRLLILLFVTELSGAHNTTVFQGVAGQSLQVSCPYDSMKHWGRRKAWCRQLGEKGPCQRVVSTHNLWLLSFLRRWNGSTAITDDTLGGTLTITLRNLQPHDAGLYQCQSLHGSEADTLRKVLVEVLADPLDHRDAGDLWFPGESESFEDAHVEHSISRSLLEGEIPFPPTSILLLLACIFLIKILAASALWAAAWHGQKPGTHPPSELDCGHDPGYQLQTLPGLRDT

SEQ ID NO: 1149 - DNA, 2082 bp, Homo Sapiens
atcactgtagtagtagctggaaagagaaatctgtgactccaattagccagttcctgcagaccttgtgaggactagaggaagaatgctcctggctgttttgtactgcctgctgtggagtttccagacctccgctggccatttccctagagcctgtgtctcctctaagaacctgatggagaaggaatgctgtccaccgtggagcggggacaggagtccctgtggccagctttcaggcagaggttcctgtcagaatatccttctgtccaatgcaccacttgggcctcaatttcccttcacaggggtggatgaccgggagtcgtggccttccgtcttttataataggacctgccagtgctctggcaacttcatgggattcaactgtggaaactgcaagtttggcttttggggaccaaactgcacagagagacgactcttggtgagaagaaacatcttcgatttgagtgccccagagaaggacaaattttttgcctacctcactttagcaaagcataccatcagctcagactatgtcatccccatagggacctatggccaaatgaaaaatggatcaacacccatgtttaacgacatcaatatttatgacctctttgtctggatgcattattatgtgtcaatggatgcactgcttgggggatctgaaatctggagagacattgattttgcccatgaagcaccagcttttctgccttggcatagactcttcttgttgcggtgggaacaagaaatccagaagctgacaggagatgaaaacttcactattccatattgggactggcgggatgcagaaaagtgtgacatttgcacagatgagtacatgggaggtcagcaccccacaaatcctaacttactcagcccagcatcattcttctcctcttggcagattgtctgtagccgattggaggagtacaacagccatcagtctttatgcaatggaacgcccgagggacctttacggcgtaatcctggaaaccatgacaaatccagaaccccaaggctcccctcttcagctgatgtagaattttgcctgagtttgacccaatatgaatctggttccatggataaagctgccaatttcagctttagaaatacactggaaggatttgctagtccacttactgggatagcggatgcctctcaaagcagcatgcacaatgccttgcacatctatatgaatggaacaatgtcccaggtacagggatctgccaacgatcctatcttccttcttcaccatgcatttgttgacagtatttttgagcagtggctccgaaggcaccgtcctcttcaagaagtttatccagaagccaatgcacccattggacataaccgggaatcctacatggttccttttataccactgtacagaaatggtgatttctttatttcatccaaagatctgggctatgactatagctatctacaagattcagacccagactcttttcaagactacattaagtcctatttggaacaagcgagtcggatctggtcatggctccttggggcggcgatggtaggggccgtcctcactgccctgctggcagggcttgtgagcttgctgtgtcgtcacaagagaaagcagcttcctgaagaaaagcagccactcctcatggagaaagaggattaccacagcttgtatcagagccatttataaaaggcttaggcaatagagtagggccaaaaagcctgacctcactctaactcaaagtaatgtccaggttcccagagaatatctgctggtatttttctgtaaagaccatttgcaaaattgtaacctaatacaaagtgtagccttcttccaactcaggtagaacacacctgtctttgtcttgctgttttcactcagcccttttaacattttcccctaagcccatatgtctaaggaaaggatgctatttggtaatgaggaactgttatttgtatgtgaattaaagtgctcttattttaaaaaattgaaataattttgatttttgccttctgattatttaaagatctatatatgttttattggccccttctttattttaataaaacagtgagaaatctaaaaaaaaaaaaaaaaaa

SEQ ID NO: 1150 - protein, 529 aa, Homo Sapiens [sequence omitted]

SEQ ID NO: 1151 - DNA, 2556 bp, Homo Sapiens
agcctcagccttgcctctccccctcttgctttatctcctcatttctgtgtgcaggcgagcttcttggcctaagggcaggaagagatggcagcgggggagacgcagctctacgccaaggtctccaacaagctcaagagccgcagcagcccctcgctcctggagcccctcctggccatgggcttcccggtgcacaccgcgctgaaagcgttggcagccacggggaggaagacggcggaggaggccttggcctggctgcatgatcattgcaatgacccttccctagacgaccccatcccccaggagtatgcccttttcctctgtccaacggggcccctgctggaaaaacttcaagagttctggagagagagcaagcgccagtgtgcaaagaacagagctcatgaggtcttcccacacgtgacactctgtgacttcttcacgtgtgaagaccagaaggtggaatgcctgtacgaggcgctgaagagagctggagacaggctcctgggctccttccccacggccgtgcctctggctctccactcctccatcagctacctcggcttcttcgtcagtggcagccccgcagacgtcatccgggaattcgccatgaccttcgccacggaagcatctctcttagcaggcacttccgtttcccgcttctggattttcagccaggtgcctggacatggccctaacctgaggctgagcaatttaactagagcctccttcgtgagccactacatccttcaaaaatactgctccgtgaagccttgcaccaaacagctgcatctgaccttggcccacaagttctacccccaccaccagaggacgctggagcagctggccagagccatccccctgggccacagctgccagtggaccgcagcactctactcccgagacatgcgctttgtgcactaccagaccctgagagccctattccagtacaaaccccagaacgtggatgagctgacgctaagtcctggtgactacatctttgtggaccccacgcagcaggacgaagccagcgagggctgggtgattgggatctcacagcggacgggctgccggggcttcctgccggaaaactacacggatcgagccagtgagtctgacacgtgggtgaagcacaggatgtacaccttcagtctagccacagacctgaactccagaaaggatggtgaagccagcagcagatgcagcggggaatttcttccacaaacggcaaggagtcttagcagcttacaggccttgcaggctaccgttgcaaggaagagcgtgctggtggttcgccacggggagagagtggatcagatcttcgggaaggcatggctgcagcaatgctccactcctgatgggaaatactacaggccagacctgaatttcccctgcagtctgccaagacggagtcgtgggatcaaagactttgaaaacgatcccccattatcatcgtgtggcattttccagtccagaattgcaggggacgcgctactggacagtggtatcagaatcagctctgtgtttgcctccccagccctccgctgtgtgcagacggccaaactcatcctggaagaactcaaactggagaaaaaaatcaagatacgagtggaacctggaatctttgaatggacaaaatgggaagctggcaaaaccaccccaaccctcatgagcctggaagagctgaaagaggcaaatttcaacattgacactgattacaggcccgcgtttcccctgtccgccctcatgccggccgagagctaccaggagtacatggacaggtgcacggcgagcatggtgcaaatcgtcaacacctgtccacaggacacgggtgtcatcctaattgtgagtcacggctccactctggactcctgcacgcggccactgctcgggctgccgccccgggaatgtggggattttgcccaactcgtgagaaagatcccttccctgggcatgtgcttctgtgaagaaaataaagaggaaggaaaatgggagttggtgaacccaccggtgaagaccctgacccacggggcgaacgcagcatttaactggaggaactggatctcaggcaactgagagccacggtgatgttgtcataacctcagagtggagaggcagaaaccatgtgcagaggctgggagatgctgctgtttccagaggcgtcttagtctcacccaatgtgatttgtagaagcacgagacgcacttttatatcccggaatatttccctccggctttcgcctttgtaactcccatctgtggacccatcgtccaccagcccagctgcggggagcacagggcaggtggctgggtgaggatgccgccctgcagcatgtacaccgagtgtctgcagctggggacacaactgcccgggactctaacttccaggaattaaagactcaccacacacgaaggatctaaccacttcattttccatggtctaatcattaaattcccaatcgttttttctttttctgggtccatcactctttagccatatccacatgggctaaaacaggtgtaatagtcaataaaatggtcccagaaaaccatcgaccaggtc

SEQ ID NO: 1152 - protein, 661 aa, Homo Sapiens
MAAGETQLYAKVSNKLKSRSSPSLLEPLLAMGFPVHTALKALAATGRKTAEEALAWLHDHCNDPSLDDPIPQEYALFLCPTGPLLEKLQEFWRESKRQCAKNRAHEVFPHVTLCDFFTCEDQKVECLYEALKRAGDRLLGSFPTAVPLALHSSISYLGFFVSGSPADVIREFAMTFATEASLLAGTSVSRFWIFSQVPGHGPNLRLSNLTRASFVSHYILQKYCSVKPCTKQLHLTLAHKFYPHHQRTLEQLARAIPLGHSCQWTAALYSRDMRFVHYQTLRALFQYKPQNVDELTLSPGDYIFVDPTQQDEASEGWVIGISQRTGCRGFLPENYTDRASESDTWVKHRMYTFSLATDLNSRKDGEASSRCSGEFLPQTARSLSSLQALQATVARKSVLVVRHGERVDQIFGKAWLQQCSTPDGKYYRPDLNFPCSLPRRSRGIKDFENDPPLSSCGIFQSRIAGDALLDSGIRISSVFASPALRCVQTAKLILEELKLEKKIKIRVEPGIFEWTKWEAGKTTPTLMSLEELKEANFNIDTDYRPAFPLSALMPAESYQEYMDRCTASMVQIVNTCPQDTGVILIVSHGSTLDSCTRPLLGLPPRECGDFAQLVRKIPSLGMCFCEENKEEGKWELVNPPVKTLTHGANAAFNWRNWISGN

SEQ ID NO: 1153 - DNA, 4263 bp, Homo Sapiens
aggaaacggtttattaggagggagtggtggagctgggccaggcaggaagacgctggaataagaaacatttttgctccagcccccatcccagtcccgggaggctgccgcgccagctgcgccgagcgagcccctccccggctccagcccggtccggggccgcgcccggaccccagcccgccgtccagcgctggcggtgcaactgcggccgcgcggtggaggggaggtggccccggtccgccgaaggctagcgccccgccacccgcagagcgggcccagagggaccatgaccttgggctcccccaggaaaggccttctgatgctgctgatggccttggtgacccagggagaccctgtgaagccgtctcggggcccgctggtgacctgcacgtgtgagagcccacattgcaaggggcctacctgccggggggcctggtgcacagtagtgctggtgcgggaggaggggaggcacccccaggaacatcggggctgcgggaacttgcacagggagctctgcagggggcgccccaccgagttcgtcaaccactactgctgcgacagccacctctgcaaccacaacgtgtccctggtgctggaggccacccaacctccttcggagcagccgggaacagatggccagctggccctgatcctgggccccgtgctggccttgctggccctggtggccctgggtgtcctgggcctgtggcatgtccgacggaggcaggagaagcagcgtggcctgcacagcgagctgggagagtccagtctcatcctgaaagcatctgagcagggcgacagcatgttgggggacctcctggacagtgactgcaccacagggagtggctcagggctccccttcctggtgcagaggacagtggcacggcaggttgccttggtggagtgtgtgggaaaaggccgctatggcgaagtgtggcggggcttgtggcacggtgagagtgtggccgtcaagatcttctcctcgagggatgaacagtcctggttccgggagactgagatctataacacagtgttgctcagacacgacaacatcctaggcttcatcgcctcagacatgacctcccgcaactcgagcacgcagctgtggctcatcacgcactaccacgagcacggctccctctacgactttctgcagagacagacgctggagccccatctggctctgaggctagctgtgtccgcggcatgcggcctggcgcacctgcacgtggagatcttcggtacacagggcaaaccagccattgcccaccgcgacttcaagagccgcaatgtgctggtcaagagcaacctgcagtgttgcatcgccgacctgggcctggctgtgatgcactcacagggcagcgattacctggacatcggcaacaacccgagagtgggcaccaagcggtacatggcacccgaggtgctggacgagcagatccgcacggactgctttgagtcctacaagtggactgacatctgggcctttggcctggtgctgtgggagattgcccgccggaccatcgtgaatggcatcgtggaggactatagaccacccttctatgatgtggtgcccaatgaccccagctttgaggacatgaagaaggtggtgtgtgtggatcagcagacccccaccatccctaaccggctggctgcagacccggtcctctcaggcctagctcagatgatgcgggagtgctggtacccaaacccctctgcccgactcaccgcgctgcggatcaagaagacactacaaaaaattagcaacagtccagagaagcctaaagtgattcaatagcccaggagcacctgattcctttctgcctgcagggggctgggggggtggggggcagtggatggtgccctatctgggtagaggtagtgtgagtgtggtgtgtgctggggatgggcagctgcgcctgcctgctcggcccccagcccacccagccaaaaatacagctgggctgaaacctgatcccctgctgtctggcctgctcaaagcggcaggctccctgacgcctggctctctccccacccctatggccagcatggtgcaccccctaccactcccgggacaggatgcaaaagaggctccagagtcagagtgccaagccagggaatcccagtcccagactcagagcccgggcctgcactttgccccctgcccttgatcaaccccactgccccaccagagctgccagggtggcacagggccctgtccagcccctggcacacacttccctgccaggcctcagcctctagcataagctccagagagccagggcccatcagtttctctctgtggatttgtatctcagctccatgatgccttgggctttctgtctcctcaacaagagtgcagcttgctgaatgtcagctgcctgagagagctggggcctgacttactagggcattaaatcctaagaggtcctactgaggtgtggcaggatcacaggccagtggaaaaagggcaggtcagatgggcaaggcccaggactttcagattaactgagaggatatcgaggccaagcatggcagggggaaggtcagtgggtgtcaagagacccaggtctgaccccggatgtttgctccatgtgacaaaagcaggcctgtctcaggaccttttcttttcttttttccttctttttttttttgacacggagtttcgctcttgttgtccaggctagagtgcaatggcatgatcccagctcaccgcaacgtctacctcccaggttcaaatcattctcttgcctcagactcccgagtagctgggattacaggcacatgccaccatgcctggctaattttgtatatttagtagaaacagggtttcaccatgctggccatgctggtctcgaactcctgacctcaggtgttccacctacctcagcctcccaaagtgctggggttacaggtgtgagccatcgcgcctggccaggacctttgtttcttatctacatattggaagatttggtcctgatgtcctttgaggcttctttagctctagttctctgacacttcagcctatatcacagctaacttcttcagtctcatctattccttatgctccagcccctggcaatttgcctcaagatgggggtttgaaaataactttacctgactcaaggagtgtctggagcacctcctagtctaagtctgcaagctccagttcttgcctaaaaccatgccagtggccacccttgggctcagacagctctgggccttttgaccacaagccagcccctcgccctctctgtggcatagtcttctctgccccaggactgcagggcggcttcctccaaggcttccaaggctcaaaagaaatttggctccatccaagaaggctccagctcccctactggcccctggctcaggcccacacccctggccaggcccagagagtgtgtctcaggagaattcaatggctctagagagacacacagaaagtttggcatttggaaatttcaaggatgtatgtatgctcacgtatggagcaggttgtcctggtccctgggtgcagggaagtgggctgcagggaagtggattggaggggagcttgaggaatataaggagcgggggtggagactcaggctatggacaaggacagccccaaggttgggaagacctggccttagtcgtcctcagcctaggggcagggcagtgaagaaagctctccccgctcctgctgtaatgacccagagtagcctccccaggccggcatcttatgtgtgtcttccaccatcctcatggtggcacttttctaggcctgtctcccagcattgtgcaaggctcggaagagaaccaggaagtgaaactgggtgaaaacagaaagctcaatggatgggctaggttcccagatcattagggcagagtttgcacgtcctctggtcactggaatccacccagcccacgaatcatctccctcttgaaggattttatttctactgggttttggaacaaactcctgctgagaccccacagccagaaactgaaagcagcagctccccaaagcctggaaaatccctaagagaaggcctggggcaggaagtggagtgacaggggacaggtagagagaagggggcccaatggccagggagtgaaggaggtggcgttgctgagagcagtctgcacatgcttctgtctgagtgcaggaaggtgttccagggtcgaaattacacttctcgtacctggagacgctgtttgtgggagcactgggctcatgcctggcacacaataggtctgcaataaaccatggttaaatcctga

SEQ ID NO: 1154 - protein, 503 aa, Homo Sapiens
MTLGSPRKGLLMLLMALVTQGDPVKPSRGPLVTCTCESPHCKGPTCRGAWCTVVLVREEGRHPQEHRGCGNLHRELCRGRPTEFVNHYCCDSHLCNHNVSLVLEATQPPSEQPGTDGQLALILGPVLALLALVALGVLGLWHVRRRQEKQRGLHSELGESSLILKASEQGDSMLGDLLDSDCTTGSGSGLPFLVQRTVARQVALVECVGKGRYGEVWRGLWHGESVAVKIFSSRDEQSWFRETEIYNTVLLRHDNILGFIASDMTSRNSSTQLWLITHYHEHGSLYDFLQRQTLEPHLALRLAVSAACGLAHLHVEIFGTQGKPAIAHRDFKSRNVLVKSNLQCCIADLGLAVMHSQGSDYLDIGNNPRVGTKRYMAPEVLDEQIRTDCFESYKWTDIWAFGLVLWEIARRTIVNGIVEDYRPPFYDVVPNDPSFEDMKKVVCVDQQTPTIPNRLAADPVLSGLAQMMRECWYPNPSARLTALRIKKTLQKISNSPEKPKVIQ

SEQ ID NO: 1155 - DNA, 2165 bp, Homo Sapiens
ttggccctgggggcggggcgaggcgcagaggtgcgtcctgagggcggggcggtgacgcaagagcgactcctgggggcggggcgaggccttggagatgcgtccggaggcggtggggagcgaagactgacccggggccgtgacgcgggggcaggccctggggcgggggcgggtcctggggactggggcgggcggccgaggcccggaagcggactgaggcggcctggagtcttagttggctactcgccatggacgaagcggatcggcggctcctgcggcggtgccggctgcggctggtggaagagctgcaggtggaccagctctgggacgccctgctgagccgcgagctgttcaggccccatatgatcgaggacatccagcgggcaggctctggatctcggcgggatcaggccaggcagctgatcatagatctggagactcgagggagtcaggctcttcctttgttcatctcctgcttagaggacacaggccaggacatgctggcttcgtttctgcgaactaacaggcaagcagcaaagttgtcgaagccaaccctagaaaaccttaccccagtggtgctcagaccagagattcgcaaaccagaggttctcagaccggaaacacccagaccagtggacattggttctggaggatttggtgatgtcggtgctcttgagagtttgaggggaaatgcagatttggcttacatcctgagcatggagccctgtggccactgcctcattatcaacaatgtgaacttctgccgtgagtccgggctccgcacccgcactggctccaacatcgactgtgagaagttgcggcgtcgcttctcctcgctgcatttcatggtggaggtgaagggcgacctgactgccaagaaaatggtgctggctttgctggagctggcgcagcaggaccacggtgctctggactgctgcgtggtggtcattctctctcacggctgtcaggccagccacctgcagttcccaggggctgtctacggcacagatggatgccctgtgtcggtcgagaagattgtgaacatcttcaatgggaccagctgccccagcctgggagggaagcccaagctctttttcatccaggcctgtggtggggagcagaaagaccatgggtttgaggtggcctccacttcccctgaagacgagtcccctggcagtaaccccgagccagatgccaccccgttccaggaaggtttgaggaccttcgaccagctggacgccatatctagtttgcccacacccagtgacatctttgtgtcctactctactttcccaggttttgtttcctggagggaccccaagagtggctcctggtacgttgagaccctggacgacatctttgagcagtgggctcactctgaagacctgcagtccctcctgcttagggtcgctaatgctgtttcggtgaaagggatttataaacagatgcctggttgctttaatttcctccggaaaaaacttttctttaaaacatcataaggccagggcccctcaccctgccttatcttgcaccccaaagctttcctgccccaggcctgaaagaggctgaggcctggactttcctgcaactcaaggactttgcagccggcacagggtctgctctttctctgccagtgacagacaggctcttagcagcttccagattgacgacaagtgctgaacagtggaggaagagggacagatgaatgccgtggattgcacgtggcctcttgagcagtggctggtccagggctagtgacttgtgtcccatgatccctgtgttgtctctagagcagggattaacctctgcactactgacatgtggggccaggtcaccctttgctgtgaggctgtcctgtacattgtgggatgttcagcactgtcccttgcctcaatgccagtaacgcgtcttcctgagtggtgccaaacaaaaaggttctcaggtgttgccaaatatgtcctggggtataaaactttcctcgcctgacaaccactggtctgtagggatttttggctacacacaaaccagtatcgctcatagatcagcaaaccggggcctactagagtctgaacagctgtaatctatgaattctaagtgaaattttaaaaattgttaatttttcctatattgcattaattttaaaaaataaatctgaggcaaatatggac

SEQ ID NO: 1156 - protein, 416 aa, Homo Sapiens
MDEADRRLLRRCRLRLVEELQVDQLWDALLSRELFRPHMIEDIQRAGSGSRRDQARQLIIDLETRGSQALPLFISCLEDTGQDMLASFLRTNRQAAKLSKPTLENLTPVVLRPEIRKPEVLRPETPRPVDIGSGGFGDVGALESLRGNADLAYILSMEPCGHCLIINNVNFCRESGLRTRTGSNIDCEKLRRRFSSLHFMVEVKGDLTAKKMVLALLELAQQDHGALDCCVVVILSHGCQASHLQFPGAVYGTDGCPVSVEKIVNIFNGTSCPSLGGKPKLFFIQACGGEQKDHGFEVASTSPEDESPGSNPEPDATPFQEGLRTFDQLDAISSLPTPSDIFVSYSTFPGFVSWRDPKSGSWYVETLDDIFEQWAHSEDLQSLLLRVANAVSVKGIYKQMPGCFNFLRKKLFFKTS

SEQ ID NO: 1157 - DNA, 2992 bp, Homo Sapiens
aactgagcgaggagcaattgattaatagctcggcgaggggactcactgactgttataataacactacaccagcaactcctggcttcccagcagccggaacacagacaggagagagtcagtggcaaatagacatttttcttatttcttaaaaaacagcaacttgtttgctacttttatttctgttgatttttttttcttggtgtgtgtggtggttgtttttaagtgtggagggcaaaaggagataccatcccaggctcagtccaacccctctccaaaacggcttttctgacactccaggtagcgagggagttgggtctccaggttgtgcgaggagcaaatgatgaccgccaaggccgtagacaaaatcccagtaactctcagtggttttgtgcaccagctgtctgacaacatctacccggtggaggacctcgccgccacgtcggtgaccatctttcccaatgccgaactgggaggcccctttgaccagatgaacggagtggccggagatggcatgatcaacattgacatgactggagagaagaggtcgttggatctcccatatcccagcagctttgctcccgtctctgcacctagaaaccagaccttcacttacatgggcaagttctccattgaccctcagtaccctggtgccagctgctacccagaaggcataatcaatattgtgagtgcaggcatcttgcaaggggtcacttccccagcttcaaccacagcctcatccagcgtcacctctgcctcccccaacccactggccacaggacccctgggtgtgtgcaccatgtcccagacccagcctgacctggaccacctgtactctccgccaccgcctcctcctccttattctggctgtgcaggagacctctaccaggacccttctgcgttcctgtcagcagccaccacctccacctcttcctctctggcctacccaccacctccttcctatccatcccccaagccagccacggacccaggtctcttcccaatgatcccagactatcctggattctttccatctcagtgccagagagacctacatggtacagctggcccagaccgtaagccctttccctgcccactggacaccctgcgggtgccccctccactcactccactctctacaatccgtaactttaccctggggggccccagtgctggggtgaccggaccaggggccagtggaggcagcgagggaccccggctgcctggtagcagctcagcagcagcagcagccgccgccgccgccgcctataacccacaccacctgccactgcggcccattctgaggcctcgcaagtaccccaacagacccagcaagacgccggtgcacgagaggccctacccgtgcccagcagaaggctgcgaccggcggttctcccgctctgacgagctgacacggcacatccgaatccacactgggcataagcccttccagtgtcggatctgcatgcgcaacttcagccgcagtgaccacctcaccacccatatccgcacccacaccggtgagaagcccttcgcctgtgactactgtggccgaaagtttgcccggagtgatgagaggaagcgccacaccaagatccacctgagacagaaagagcggaaaagcagtgccccctctgcatcggtgccagccccctctacagcctcctgctctgggggcgtgcagcctgggggtaccctgtgcagcagtaacagcagcagtcttggcggagggccgctcgccccttgctcctctcggacccggacaccttgagatgagactcaggctgatacaccagctcccaaaggtcccggaggccctttgtccactggagctgcacaacaaacactaccaccctttcctgtccctctctccctttgttgggcaaagggctttggtggagctagcactgccccctttccacctagaagcaggttcttcctaaaacttagcccattctagtctctcttaggtgagttgactatcaacccaaggcaaaggggaggctcagaaggaggtggtgtggggacccctggccaagagggctgaggtctgaccctgctttaaagggttgtttgactaggttttgctaccccacttccccttattttgacccatcacaggtttttgaccctggatgtcagagttgatctaagacgttttctacaataggttgggagatgctgatcccttcaagtggggacagcaaaaagacaagcaaaactgatgtgcactttatggcttgggactgatttgggggacattgtacagtgagtgaagtatagcctttatgccacactctgtggccctaaaatggtgaatcagagcatatctagttgtctcaacccttgaagcaatatgtattataaactcagagaacagaagtgcaatgtgatgggaggaacatagcaatatctgctccttttcgagttgtttgagaaatgtaggctattttttcagtgtatatccactcagattttgtgtatttttgatgtacactgttctctaaattctgaatctttgggaaaaaatgtaaagcatttatgatctcagaggttaacttatttaagggggatgtacatatattctctgaaactaggatgcatgcaattgtgttggaagtgtccttggtgccttgtgtgatgtagacaatgttacaaggtctgcatgtaaatgggttgccttattatggagaaaaaaatcactccctgagtttagtatggctgtatatttctgcctattaatatttggaattttttttagaaagtatatttttgtatgctttgttttgtgacttaaaagtgttacctttgtagtcaaatttcagataagaatgtacataatgttaccggagctgatttgtttggtcattagctcttaatagttgtgaaaaaataaatctattctaacgcaaaaccactaactgaagttcagataatggatggtttgtgactatagtgtaaataaatacttttcaacaataaaaaaaaaaaaaaa

SEQ ID NO: 1158 - protein, 476 aa, Homo Sapiens
MMTAKAVDKIPVTLSGFVHQLSDNIYPVEDLAATSVTIFPNAELGGPFDQMNGVAGDGMINIDMTGEKRSLDLPYPSSFAPVSAPRNQTFTYMGKFSIDPQYPGASCYPEGIINIVSAGILQGVTSPASTTASSSVTSASPNPLATGPLGVCTMSQTQPDLDHLYSPPPPPPPYSGCAGDLYQDPSAFLSAATTSTSSSLAYPPPPSYPSPKPATDPGLFPMIPDYPGFFPSQCQRDLHGTAGPDRKPFPCPLDTLRVPPPLTPLSTIRNFTLGGPSAGVTGPGASGGSEGPRLPGSSSAAAAAAAAAAYNPHHLPLRPILRPRKYPNRPSKTPVHERPYPCPAEGCDRRFSRSDELTRHIRIHTGHKPFQCRICMRNFSRSDHLTTHIRTHTGEKPFACDYCGRKFARSDERKRHTKIHLRQKERKSSAPSASVPAPSTASCSGGVQPGGTLCSSNSSSLGGGPLAPCSSRTRTP

SEQ ID NO: 1159 - DNA, 11695 bp, Homo Sapiens
agtatttctctcgcgagaaaccgctgcgcggacgatacttgaagaggtggggaaaggagggggctgcgggagccgcggcagagactgtgggtgccacaagcggacaggagccacagctgggacagctgcgagcggagccgagcagtggctgtagcggccacgactgggagcagccgccgccgcctcctcgggagtcggagccgccgcttctccactggcaggggccgcctgaagtgggagcagcgcctggagaaggcgggaggagcccggcccgggggacgggcggcgggatagcgggaccccggcggcgcggtgcgcttcagggcgcagcggcggccgcagaccgagccccgggcgcggcaagaggcggcgggagccggtggcggctcggcatcatgcgtcgagggcgtctgctggagatcgccctgggatttaccgtgcttttagcgtcctacacgagccatggggcggacgccaatttggaggctgggaacgtgaaggaaaccagagccagtcgggccaagagaagaggcggtggaggacacgacgcgcttaaaggacccaatgtctgtggatcacgttataatgcttactgttgccctggatggaaaaccttacctggcggaaatcagtgtattgtccccatttgccggcattcctgtggggatggattttgttcgaggccaaatatgtgcacttgcccatctggtcagatagctccttcctgtggctccagatccatacaacactgcaatattcgctgtatgaatggaggtagctgcagtgacgatcactgtctatgccagaaaggatacatagggactcactgtggacaacctgtttgtgaaagtggctgtctcaatggaggaaggtgtgtggccccaaatcgatgtgcatgcacttacggatttactggaccccagtgtgaaagagattacaggacaggcccatgttttactgtgatcagcaaccagatgtgccagggacaactcagcgggattgtctgcacaaaaacgctctgctgtgccacagtcggccgagcctggggccacccctgtgagatgtgtcctgcccagcctcacccctgccgccgtggcttcattccaaatatccgcacgggagcttgtcaagatgtggatgaatgccaggccatccccgggctctgtcagggaggaaattgcattaatactgttgggtcttttgagtgcaaatgccctgctggacacaaacttaatgaagtgtcacaaaaatgtgaagatattgatgaatgcagcaccattcctggaatctgtgaagggggtgaatgtacaaacacagtcagcagttacttttgcaaatgtccccctggtttttacacctctccagatggtaccagatgcatagatgttcgcccaggatactgttacacagctctgacaaacgggcgctgctctaaccagctgccacagtccataaccaaaatgcagtgctgctgtgatgccggccgatgctggtctccaggggtcactgtcgcccctgagatgtgtcccatcagagcaaccgaggatttcaacaagctgtgctctgttcctatggtaattcctgggagaccagaatatcctcccccaccccttggccccattcctccagttctccctgttcctcctggctttcctcctggacctcaaattccggtccctcgaccaccagtggaatatctgtatccatctcgggagccaccaagggtgctgccagtaaacgttactgattactgccagttggtccgctatctctgtcaaaatggacgctgcattccaactcctgggagttaccggtgtgagtgcaacaaagggttccagctggacctccgtggggagtgtattgatgttgatgaatgtgagaaaaacccctgtgctggtggtgagtgtattaacaaccagggttcgtacacctgtcagtgccgagctggatatcagagcacactcacgcggacagaatgccgagacattgatgagtgtttacagaatggccggatctgcaataatggacgctgcatcaacacagatggcagttttcattgcgtgtgtaatgcgggctttcatgttacacgagatgggaagaactgtgaagatatggatgaatgcagcataaggaacatgtgccttaatggaatgtgtatcaatgaagatggcagttttaaatgtatttgcaaacctggattccagctggcatcagatggacgttattgcaaagacattaacgagtgtgaaacccctgggatctgcatgaatgggcgttgcgtcaacactgatggctcctacagatgtgaatgcttccctggactggctgtgggtctggatggccgtgtgtgtgttgacacacacatgcggagcacatgctatggtggatacaagagaggccagtgtatcaaacctttgtttggtgctgtcactaaatctgaatgctgttgcgccagcactgagtatgcatttggggaaccttgccagccgtgtcctgcacagaattcagcggaatatcaggcactctgcagcagtgggccaggaatgacgtcagcaggcagtgatataaatgaatgtgcactagatcctgatatttgcccaaatggaatctgtgaaaaccttcgtgggacctataaatgtatatgcaattcaggatatgaagtggattcaactgggaaaaactgcgttgatattaatgaatgtgtactgaacagtctcctttgtgacaatggacaatgtagaaatactcctggaagttttgtctgtacctgccccaagggatttatctacaaacctgatctaaaaacatgtgaagacattgatgaatgcgaatcaagtccttgcattaatggagtctgcaagaacagcccaggctcttttatttgtgaatgttcttctgaaagtactttggatccaacaaaaaccatctgcatagaaaccatcaagggcacttgctggcagactgtcattgatgggcgatgtgagatcaacatcaatggagccaccttaaagtcccagtgctgctcctccctcggtgctgcgtggggaagcccgtgcaccctatgccaagttgatcccatatgtggtaaagggtactcaagaattaaaggaacacaatgtgaagatatagatgaatgtgaagtgttcccaggagtgtgtaaaaatggcctgtgtgttaacactagggggtcattcaagtgtcagtgtcccagtggaatgactttggatgccacaggaaggatctgtcttgatatccgcctggaaacctgcttcctgaggtacgaggacgaggagtgcaccctgcctattgctggccgccaccgcatggacgcctgctgctgctccgtcggggcagcctggggtactgaggaatgcgaggagtgtcccatgagaaatactcctgagtacgaggagctgtgtccgagaggacccggatttgccacaaaagaaattacaaatggaaagcctttcttcaaagatatcaatgagtgcaagatgatacccagcctctgcacccacggcaagtgcagaaacaccattggcagctttaagtgcaggtgtgacagcggctttgctcttgattctgaagaaaggaactgcacagacattgacgaatgccgcatatctcctgacctctgtggcagaggccagtgtgtgaacacccctggggactttgaatgcaagtgtgacgaaggctatgaaagtggattcatgatgatgaagaactgcatggatattgatgagtgtcagagagatcctctcctatgccgaggtggtgtttgccataacacagagggaagttaccgctgtgaatgcccgcctggccatcagctgtcccccaacatctccgcgtgtatcgacatcaatgaatgtgagctgagtgcacacctgtgccccaatggccgttgcgtgaacctcatagggaagtatcagtgtgcctgcaaccctggctaccattcaactcccgataggctattttgtgttgacattgatgaatgcagcataatgaatggtggttgtgaaaccttctgcacaaactctgaaggcagctatgaatgtagctgtcagccgggatttgcactaatgcctgaccagagatcatgcaccgacatcgatgagtgtgaagataatcccaatatctgtgatggtggtcagtgcacaaatatccctggagagtacaggtgcttgtgttatgatggattcatggcatctgaagacatgaagacttgtgtagatgtcaatgagtgtgacctgaatccaaatatctgcctaagtgggacctgtgaaaacacgaaaggctcatttatctgccactgtgatatgggctactccggcaaaaaaggaaaaactggctgtacagacatcaatgaatgtgaaattggagcacacaactgtggcaaacatgctgtatgtaccaatacagcaggaagcttcaaatgtagctgcagtcccgggtggattggagatggcattaagtgcactgatctggacgaatgttccaatggaacccatatgtgcagccagcatgcagactgcaagaataccatgggatcttaccgctgtctgtgcaaggaaggatacacaggtgatggcttcacttgtacagaccttgatgagtgctctgagaacctgaatctctgtggcaatggccagtgcctcaatgcaccaggaggataccgctgtgaatgcgacatgggcttcgtgcccagtgctgacgggaaagcctgtgaagatattgatgagtgctcccttccgaacatctgtgtctttggaacttgccacaacctccctggcctgttccgctgtgagtgtgagataggctacgaactggacagaagcggcgggaactgcacagatgtgaatgaatgcctggatccaaccacgtgcatcagtgggaactgtgtcaacactccaggcagctatatctgtgactgcccacctgattttgaactgaacccaactcgagttggctgtgttgatacccgctctggaaattgctatttggatattcgacctcgaggagacaatggagatacagcctgcagcaatgaaattggagttggtgtttccaaagcttcctgctgctgttctctgggtaaagcctggggtactccttgtgagatgtgtcctgctgtgaacacatccgagtacaaaattctttgtcctggaggggaaggtttccgaccaaatcctatcaccgttatattggaagatattgatgagtgccaggagctaccagggctgtgccaaggaggaaaatgtatcaacacctttgggagtttccagtgccgctgtccaaccggctactacctgaatgaagatacacgagtgtgtgatgatgtgaatgaatgtgagactcctggaatctgtggtccagggacatgttacaacaccgttggcaactacacctgtatctgtcctccagactacatgcaagtgaatgggggaaataattgcatggatatgagaagaagtttgtgctacagaaactactatgctgacaaccagacctgtgatggagaattgttattcaacatgaccaagaagatgtgctgctgttcctacaacattggccgggcgtggaacaagccctgtgaacagtgtcccatcccaagtacagatgagtttgctacactctgtggaagtcaaaggccaggctttgtcatcgacatttataccggtttacccgttgatattgatgagtgccgggagatcccaggggtctgtgaaaatggagtgtgtatcaacatggttggcagcttccgatgtgaatgtccagtgggattcttctataatgacaagttgttggtttgtgaagatattgacgagtgtcagaacggcccagtgtgccagcgcaacgccgaatgcatcaacactgcaggcagctaccgctgtgactgtaagcccggctaccgcttcacctccacaggacagtgcaatgatcgtaatgaatgtcaagaaatccccaatatatgcagtcatgggcagtgcattgacacagttggaagcttttattgcctttgccacactggttttaaaacaaatgatgaccaaaccatgtgcttggacataaatgaatgtgaaagagatgcctgtgggaatggaacttgccggaacacaattggttccttcaactgccgctgcaatcatggtttcatcctttctcacaacaatgactgtatagatgttgatgaatgtgcaagtggaaatgggaatctttgcagaaatggccaatgcattaatacagtggggtctttccagtgccagtgcaatgaaggctatgaggtggctccagatgggaggacctgtgtggatatcaatgaatgtcttctagaacccagaaaatgtgcaccaggtacctgtcaaaacttggatgggtcctacagatgcatttgcccacctggatacagtcttcaaaatgagaagtgtgaagatattgatgagtgtgtcgaagagccagaaatttgtgccctgggcacatgcagtaacactgaaggcagcttcaaatgtctgtgtccagaagggttttccttgtcctccagtggaagaaggtgccaagatttgcgaatgagctactgttatgcgaagtttgaaggaggaaagtgttcatcacccaaatccagaaatcactccaagcaggaatgctgctgtgccttgaagggagaaggctggggagacccctgcgagctctgccccacggaacctgatgaggccttccgccagatatgtccttatggaagtgggatcatcgtgggacctgatgattcagcagttgatatggacgaatgcaaagaacccgatgtctgtaaacatggacagtgcatcaatacagatggttcctatcgctgcgagtgtccctttggttatattctagcagggaatgaatgtgtagatactgatgaatgttctgttggcaatccttgtggaaatggaacctgcaagaatgtgattggaggttttgaatgcacctgcgaggagggatttgagcccggtccaatgatgacatgtgaagatataaatgaatgtgcccagaatcctctgctctgtgccttccgatgtgtgaacacttatgggtcatatgaatgcaaatgtcccgtgggatatgtgctcagagaagaccgtaggatgtgcaaagatgaggatgagtgtgaagagggaaaacatgactgtactgaaaaacaaatggaatgcaagaacctcattggcacatatatgtgcatctgtggacccgggtatcagcggagacctgatggagaaggctgtgtagatgagaatgaatgtcagacgaagccagggatctgtgagaatgggcgctgcctcaacacccgtgggagctacacctgtgagtgtaatgatgggtttaccgccagccccaaccaggacgagtgccttgacaatcgggaagggtactgcttcacagaggtgctacaaaacatgtgtcagatcggctccagcaacaggaaccccgtcaccaaatcggaatgctgctgtgacggagggagaggctggggtccccactgtgagatctgccctttccaggggactgtggctttcaagaaactctgtccccatggccgaggattcatgaccaatggagcagatatcgatgaatgcaaggttattcacgatgtttgccgaaatggggaatgtgtcaatgacagaggatcatatcattgcatttgtaaaactgggtacactccagatataactgggacttcctgtgtagatctgaacgagtgcaaccaggctcccaaaccctgcaattttatctgcaaaaacacagaagggagttaccagtgttcatgcccgaaaggctacattctgcaagaggatggaaggagctgcaaagatcttgatgagtgtgcaaccaagcaacacaactgccagttcctatgtgttaacaccattggcggcttcacatgcaaatgtcctcccggatttacccaacaccatacgtcctgcattgataacaatgaatgcacctctgacatcaatctgtgcgggtctaagggcatttgccagaacactcctggaagcttcacctgtgaatgccagcggggattctcacttgatcagaccggctccagctgtgaagacgtggacgagtgtgagggtaaccaccgctgccagcatggctgccagaacatcattgggggctacaggtgcagctgcccccagggctacctccagcactaccagtggaaccagtgtgttgatgaaaacgaatgcctcagcgctcacatctgcggaggagcctcctgtcacaacaccctggggagctacaagtgcatgtgtcccgccggcttccagtatgaacagttcagtggaggatgccaagacatcaatgaatgtggctctgcgcaggccccctgcagctatggctgttccaataccgagggcggttacctgtgtggctgtccacctggttacttccgcataggccaagggcactgtgtttctggaatgggcatgggccgaggaaacccagagccacctgtcagtggtgaaatggatgacaattcactctccccagaggcttgttacgagtgtaagatcaatggctaccccaaacggggcaggaaacggagaagcacaaacgaaactgatgcctccaatatcgaggatcagtctgagacagaagccaatgtgagtcttgcaagttgggatgttgagaagacagccatctttgctttcaatatttcccacgtcagtaacaaggttcgaatcctagaactccttccagctcttacaactctgacgaatcacaacagatacttgatcgaatctggaaatgaagatggcttctttaaaatcaaccaaaaggaagggatcagctacctccacttcacaaagaagaagccagtggctggaacctattcattacaaatcagtagtactccactttataaaaagaaagaacttaaccaactagaagacaaatatgacaaagactacctcagtggtgaactgggtgataatctgaagatgaaaatccaggttttgcttcattaattcaccatccagagaccaaataattaaaagaaaaacaaatatagataggtagaactatattttcccccaatcagaatcatcatatcataggtacaatctttcaccaagtaaatttgtataaataagcactattctttgtattaccaaagcaaggtacaggtgactaccctagttcaaaacaaccactttctcaggcttctcatgtgtgtagctaagctaccttgtcatatgtgttgattcttgaaaactgggacgtgtatttccattgggggttggccatttatgctgacatgccatccttccagcaaacgtacgggaatgtgctttcaattgatggactactctattttttgcaaatttgtaaactttgcttctccaaatacaagtactaggttgtccatttatggtacctatttggtgctagtaaattttcaaactagatttataaatgcactgtaatatgtacacaacttagaaaccaaattacaagtattcagttccaatacttcattaatttcaatcaaccaaagttagttcagtagcttatctcagttatgagtataatacattacatgtaaattaagtgtgtgtatactgtaatcgtgctattttttatcattgaaacatttataaactagaataataatgcccttaatgtgagggtttgtaatggtgcttattaagaccaaagacttgttaaatgtatacaccaagtggtaatgaaatttcggtgactggcccacacgtgcatagaggtctgggaggaccaggaaacagcctcagtggccagaggatcaccagtgcatccttcatcacagcatgtgcaatatgccaagattaccctcggtcattcctgtcaacaaggggtcaatgtcataaatgtcacaataaaacaatctcttcttttttttagtttaccccttggctttgtgttcttgcatggatttggggttggaggggccattccggaggctaaataaagtctcctggatttaaattatcctgggtctcttacttatggcttatgaaagtaccaaatgtataaccactagaagaaaatttaacatatgagtcgatcccttgttttatccattgaaagtagcagagtctggtgtcattaacctgacttgcttgtgagaaatttagattgtagagtcatttctgaaacatgacctaattcatcttgtgacttttaaatagtcttaaataccaagttcagtcattgtcttagagcacatgaatttcattataatagatttatcatgcccccctctcaaatatacacagttttggcaagccttaggtgttctgttccatttttttttcccctaaacatctttcgttagtcaatgctcatctaattacaaagggataatcccagactgtatccaattgctgtaacttttggtttcttaatgtcataatttttaaagtctgttttattttaagtgcaatattgagtatttagctgttaggctcaatccgtcgatatgaaataattttttaaatccctaagggcaggaaagcatttcgtggtagtgaaaataagaggaaataagatggcatgaaggtggtgggcggagaaactaggtaggacacaggaaagtgctctcaaaaatctttgaagagctcagctgaaaaaaatggagtagatttggctcatactattccggaaggcaaaaccagggtcagctgatgtcagccccagtttaatacacacggtcccaattatagagctactcactgaaagaatgggtttccttgcattgtggtgagctccctgtcacaagatagaagagtttcagtctaggcttaatggcaaccattggacaaagatgctttcttccacctaacaggccattaacatcttaaaggtatttttgtatctctaattttgtttataataggtgctcaacagaatgagctgaatggctgttacaaagggggtttgtaccttgggtaagagattaaaatataactcaaaatttccttctaacgctgcacctatggaaccatgtgatagaggtgtattaaaattgttatcgaagaatatatagcatatggtaaacaacagtttgcatatggaaaatgtctttgataatttaaccagaactgcattatattcaataacggattttctttataacaaacaacaggggaaaatggagttggcacacagtggatcactttgatatttttaatagtccaagtctggattttatttattcctgagccaacaattttgaacagcatattttccatgtttctgactgtaacaaaacattttcctcattgttccattgtaaatattcctcttgttggaactctttttaatcctgagatttaaacctgtacctttcaattgtctgtgacctttcaatttcactttcaatagttgaagaacttggctttgtaaatctctcagaagcttgaaaatatcttgtctctaccccctcagcccatttcatttgccaataattattttgtaagtagggttgaaatgaactcagctggccttgtgaaatgtttaaacttgcacaaacaactacatttttgttcaacaaatagcagtttactcagccaaaatcactttggatattgccattacaaatactgttaaacttcagaaatcatgtctgtaaattagatgagccaaaataaaggacaattgggttgatgctgca

SEQ ID NO: 1160 - protein, 2871 aa, Homo Sapiens
MRRGRLLEIALGFTVLLASYTSHGADANLEAGNVKETRASRAKRRGGGGHDALKGPNVCGSRYNAYCCPGWKTLPGGNQCIVPICRHSCGDGFCSRPNMCTCPSGQIAPSCGSRSIQHCNIRCMNGGSCSDDHCLCQKGYIGTHCGQPVCESGCLNGGRCVAPNRCACTYGFTGPQCERDYRTGPCFTVISNQMCQGQLSGIVCTKTLCCATVGRAWGHPCEMCPAQPHPCRRGFIPNIRTGACQDVDECQAIPGLCQGGNCINTVGSFECKCPAGHKLNEVSQKCEDIDECSTIPGICEGGECTNTVSSYFCKCPPGFYTSPDGTRCIDVRPGYCYTALTNGRCSNQLPQSITKMQCCCDAGRCWSPGVTVAPEMCPIRATEDFNKLCSVPMVIPGRPEYPPPPLGPIPPVLPVPPGFPPGPQIPVPRPPVEYLYPSREPPRVLPVNVTDYCQLVRYLCQNGRCIPTPGSYRCECNKGFQLDLRGECIDVDECEKNPCAGGECINNQGSYTCQCRAGYQSTLTRTECRDIDECLQNGRICNNGRCINTDGSFHCVCNAGFHVTRDGKNCEDMDECSIRNMCLNGMCINEDGSFKCICKPGFQLASDGRYCKDINECETPGICMNGRCVNTDGSYRCECFPGLAVGLDGRVCVDTHMRSTCYGGYKRGQCIKPLFGAVTKSECCCASTEYAFGEPCQPCPAQNSAEYQALCSSGPGMTSAGSDINECALDPDICPNGICENLRGTYKCICNSGYEVDSTGKNCVDINECVLNSLLCDNGQCRNTPGSFVCTCPKGFIYKPDLKTCEDIDECESSPCINGVCKNSPGSFICECSSESTLDPTKTICIETIKGTCWQTVIDGRCEININGATLKSQCCSSLGAAWGSPCTLCQVDPICGKGYSRIKGTQCEDIDECEVFPGVCKNGLCVNTRGSFKCQCPSGMTLDATGRICLDIRLETCFLRYEDEECTLPIAGRHRMDACCCSVGAAWGTEECEECPMRNTPEYEELCPRGPGFATKEITNGKPFFKDINECKMIPSLCTHGKCRNTIGSFKCRCDSGFALDSEERNCTDIDECRISPDLCGRGQCVNTPGDFECKCDEGYESGFMMMKNCMDIDECQRDPLLCRGGVCHNTEGSYRCECPPGHQLSPNISACIDINECELSAHLCPNGRCVNLIGKYQCACNPGYHSTPDRLFCVDIDECSIMNGGCETFCTNSEGSYECSCQPGFALMPDQRSCTDIDECEDNPNICDGGQCTNIPGEYRCLCYDGFMASEDMKTCVDVNECDLNPNICLSGTCENTKGSFICHCDMGYSGKKGKTGCTDINECEIGAHNCGKHAVCTNTAGSFKCSCSPGWIGDGIKCTDLDECSNGTHMCSQHADCKNTMGSYRCLCKEGYTGDGFTCTDLDECSENLNLCGNGQCLNAPGGYRCECDMGFVPSADGKACEDIDECSLPNICVFGTCHNLPGLFRCECEIGYELDRSGGNCTDVNECLDPTTCISGNCVNTPGSYICDCPPDFELNPTRVGCVDTRSGNCYLDIRPRGDNGDTACSNEIGVGVSKASCCCSLGKAWGTPCEMCPAVNTSEYKILCPGGEGFRPNPITVILEDIDECQELPGLCQGGKCINTFGSFQCRCPTGYYLNEDTRVCDDVNECETPGICGPGTCYNTVGNYTCICPPDYMQVNGGNNCMDMRRSLCYRNYYADNQTCDGELLFNMTKKMCCCSYNIGRAWNKPCEQCPIPSTDEFATLCGSQRPGFVIDIYTGLPVDIDECREIPGVCENGVCINMVGSFRCECPVGFFYNDKLLVCEDIDECQNGPVCQRNAECINTAGSYRCDCKPGYRFTSTGQCNDRNECQEIPNICSHGQCIDTVGSFYCLCHTGFKTNDDQTMCLDINECERDACGNGTCRNTIGSFNCRCNHGFILSHNNDCIDVDECASGNGNLCRNGQCINTVGSFQCQCNEGYEVAPDGRTCVDINECLLEPRKCAPGTCQNLDGSYRCICPPGYSLQNEKCEDIDECVEEPEICALGTCSNTEGSFKCLCPEGFSLSSSGRRCQDLRMSYCYAKFEGGKCSSPKSRNHSKQECCCALKGEGWGDPCELCPTEPDEAFRQICPYGSGIIVGPDDSAVDMDECKEPDVCKHGQCINTDGSYRCECPFGYILAGNECVDTDECSVGNPCGNGTCKNVIGGFECTCEEGFEPGPMMTCEDINECAQNPLLCAFRCVNTYGSYECKCPVGYVLREDRRMCKDEDECEEGKHDCTEKQMECKNLIGTYMCICGPGYQRRPDGEGCVDENECQTKPGICENGRCLNTRGSYTCECNDGFTASPNQDECLDNREGYCFTEVLQNMCQIGSSNRNPVTKSECCCDGGRGWGPHCEICPFQGTVAFKKLCPHGRGFMTNGADIDECKVIHDVCRNGECVNDRGSYHCICKTGYTPDITGTSCVDLNECNQAPKPCNFICKNTEGSYQCSCPKGYILQEDGRSCKDLDECATKQHNCQFLCVNTIGGFTCKCPPGFTQHHTSCIDNNECTSDINLCGSKGICQNTPGSFTCECQRGFSLDQTGSSCEDVDECEGNHRCQHGCQNIIGGYRCSCPQGYLQHYQWNQCVDENECLSAHICGGASCHNTLGSYKCMCPAGFQYEQFSGGCQDINECGSAQAPCSYGCSNTEGGYLCGCPPGYFRIGQGHCVSGMGMGRGNPEPPVSGEMDDNSLSPEACYECKINGYPKRGRKRRSTNETDASNIEDQSETEANVSLASWDVEKTAIFAFNISHVSNKVRILELLPALTTLTNHNRYLIESGNEDGFFKINQKEGISYLHFTKKKPVAGTYSLQISSTPLYKKKELNQLEDKYDKDYLSGELGDNLKMKIQVLLH

SEQ ID NO: 1161 - DNA, 2069 bp, Homo Sapiens
atgctgccggactggaagagctccttgatcctcatggcttacatcatcatcttcctcactggcctccctgccaacctcctggccctgcgggcctttgtggggcggatccgccagccccagcctgcacctgtgcacatcctcctgctgagcctgacgctggccgacctcctcctgctgctgctgctgcccttcaagatcatcgaggctgcgtcgaacttccgctggtacctgcccaaggtcgtctgcgccctcacgagttttggcttctacagcagcatctactgcagcacgtggctcctggcgggcatcagcatcgagcgctacctgggagtggctttccccgtgcagtacaagctctcccgccggcctctgtatggagtgattgcagctctggtggcctgggttatgtcctttggtcactgcaccatcgtgatcatcgttcaatacttgaacacgactgagcaggtcagaagtggcaatgaaattacctgctacgagaacttcaccgataaccagttggacgtggtgctgcccgtgcggctggagctgtgcctggtgctcttcttcatccccatggcagtcaccatcttctgctactggcgttttgtgtggatcatgctctcccagccccttgtgggggcccagaggcggcgccgagccgtggggctggctgtggtgacgctgctcaatttcctggtgtgcttcggaccttacaacgtgtcccacctggtggggtatcaccagagaaaaagcccctggtggcggtcaatagccgtggtgttcagttcactcaacgccagtctggaccccctgctcttctatttctcttcttcagtggtgcgcagggcatttgggagagggctgcaggtgctgcggaatcagggctcctccctgttgggacgcagaggcaaagacacagcagaggggacaaatgaggacaggggtgtgggtcaaggagaagggatgccaagttcggacttcactacagagtagcagtttccctggaccttcagaggtcgcctgggttacacaggagctgggaagcctgggagaggcggagcaggaaggctcccatccagattcagaaatccttagacccagcccaggactgcgactttgaaaaaaatgcctttcaccagcttggtatcccttcctgactgaattgtcctactcaaaggagcataagtcagagatgcacgaagaagtagttaggtatagaagcacctgccgggtgtggtggctcatgcctataatcccagaactttgggaggctgaggcaggtggatcacttgaggtcgggagattgagaacatcctggtcaacatgggaaaaccccgtctctactaaaaatacaaaaaaattagctgggcatggtggcacatgcctataatcccagctactctggaggctgaggcaggagaatccttgaacccgggagttggaggttgcagtgagctgagatcacgccactgcactccagcctagcgacagagcaagactccatttaaaaaaaaaaaaaaaaaaaaaaagaagcaccttcaggctggagaagcagcgtagctaacacaagtccagtccttgtgatgtggctggtagttggggatggccaggctgaagcagagagtcctagagaaatctcgatacaagcttcaaagcaacacctagacactgctctagcggttgatcctggagataaaccaacaagagagagatggaagagaaatactaaatgaggtcaaagaagactcagaaaggttctgagcctggagatgagcagggaggcctcagggcttagacctttaatgataggggtttccctgcattggtttgacctgttgcctttttgatgtgctctgtttgttttcatgtgttgtcttgtctcccctgctaaactgggagctgccaggggtctgggtcttatctccttcctccatggtaccccacacaggccaggatgtggtttggtacccagcaatcagagattggcactccctcatacaggggaaagcaacctggtctagcaaattgaaaataaagatgataaaactctgaaaaaaaaaaaaaaaaaa

SEQ ID NO: 1162 - protein, 330 aa, Homo Sapiens
MLPDWKSSLILMAYIIIFLTGLPANLLALRAFVGRIRQPQPAPVHILLLSLTLADLLLLLLLPFKIIEAASNFRWYLPKVVCALTSFGFYSSIYCSTWLLAGISIERYLGVAFPVQYKLSRRPLYGVIAALVAWVMSFGHCTIVIIVQYLNTTEQVRSGNEITCYENFTDNQLDVVLPVRLELCLVLFFIPMAVTIFCYWRFVWIMLSQPLVGAQRRRRAVGLAVVTLLNFLVCFGPYNVSHLVGYHQRKSPWWRSIAVVFSSLNASLDPLLFYFSSSVVRRAFGRGLQVLRNQGSSLLGRRGKDTAEGTNEDRGVGQGEGMPSSDFTTE

SEQ ID NO: 1163 - DNA, 3349 bp, Homo Sapiens; identical to SEQ ID NO: 463

SEQ ID NO: 1164 - protein, 336 aa, Homo Sapiens; identical to SEQ ID NO: 464

SEQ ID NO: 1165 - DNA, 2168 bp, Homo Sapiens
ggagttagcctcgctcagggcgcggctaaggcgcccagatggcctgcgggcgccaccacgtccctggtcccagctcgggagcacatcagaggcttagaggcgagtgggaagggactcagacagtgcaggacgagaaacgcccgcggcaccaaagcccctcagagcgtcgcccccgcctctagttctagaaagtcagtttcccggcactggcaccccggaacctcaggggctgccgagctgggggggcgctcaagctgcgaggatccgggctgcccgcgagacgaggagcgggcgcccaggatggggtgcatgaagtccaagttcctccaggtcggaggcaatacattctcaaaaactgaaaccagcgccagcccacactgtcctgtgtacgtgccggatcccacatccaccatcaagccggggcctaatagccacaacagcaacacaccaggaatcagggaggcaggctctgaggacatcatcgtggttgccctgtatgattacgaggccattcaccacgaagacctcagcttccagaagggggaccagatggtggtcctagaggaatccggggagtggtggaaggctcgatccctggccacccggaaggagggctacatcccaagcaactatgtcgcccgcgttgactctctggagacagaggagtggtttttcaagggcatcagccggaaggacgcagagcgccaactgctggctcccggcaacatgctgggctccttcatgatccgggatagcgagaccactaaaggaagctactctttgtccgtgcgagactacgaccctcggcagggagataccgtgaaacattacaagatccggaccctggacaacgggggcttctacatatccccccgaagcaccttcagcactctgcaggagctggtggaccactacaagaaggggaacgacgggctctgccagaaactgtcggtgccctgcatgtcttccaagccccagaagccttgggagaaagatgcctgggagatccctcgggaatccctcaagctggagaagaaacttggagctgggcagtttggggaagtctggatggccacctacaacaagcacaccaaggtggcagtgaagacgatgaagccagggagcatgtcggtggaggccttcctggcagaggccaacgtgatgaaaactctgcagcatgacaagctggtcaaacttcatgcggtggtcaccaaggagcccatctacatcatcacggagttcatggccaaaggaagcttgctggactttctgaaaagtgatgagggcagcaagcagccattgccaaaactcattgacttctcagcccagattgcagaaggcatggccttcatcgagcagaggaactacatccaccgagacctccgagctgccaacatcttggtctctgcatccctggtgtgtaagattgctgactttggcctggcccgggtcattgaggacaacgagtacacggctcgggaaggggccaagttccccatcaagtggacagctcctgaagccatcaactttggctccttcaccatcaagtcagacgtctggtcctttggtatcctgctgatggagatcgtcacctacggccggatcccttacccagggatgtcaaaccctgaagtgatccgagctctggagcgtggataccggatgcctcgcccagagaactgcccagaggagctctacaacatcatgatgcgctgctggaaaaaccgtccggaggagcggccgaccttcgaatacatccagagtgtgctggatgacttctacacggccacagagagccagtaccaacagcagccatgatagggaggaccagggcagggccagggggtgcccaggtggtggctgcaaggtggctccagcaccatccgccagggcccacacccccttcctactcccagacacccaccctcgcttcagccacagtttcctcatctgtccagtgggtaggttggactggaaaatctctttttgactcttgcaatccacaatctgacattctcaggaagcccccaagttgatatttctatttcctggaatggttggattttagttacagctgtgatttggaagggaaactttcaaaatagtgaaatgaatatttaaataaaagatataaatgccaaagtctttaccaaaaaaaaaaaaaaaaa

SEQ ID NO: 1166 - protein, 526 aa, Homo Sapiens
MGGRSSCEDPGCPRDEERAPRMGCMKSKFLQVGGNTFSKTETSASPHCPVYVPDPTSTIKPGPNSHNSNTPGIREAGSEDIIVVALYDYEAIHHEDLSFQKGDQMVVLEESGEWWKARSLATRKEGYIPSNYVARVDSLETEEWFFKGISRKDAERQLLAPGNMLGSFMIRDSETTKGSYSLSVRDYDPRQGDTVKHYKIRTLDNGGFYISPRSTFSTLQELVDHYKKGNDGLCQKLSVPCMSSKPQKPWEKDAWEIPRESLKLEKKLGAGQFGEVWMATYNKHTKVAVKTMKPGSMSVEAFLAEANVMKTLQHDKLVKLHAVVTKEPIYIITEFMAKGSLLDFLKSDEGSKQPLPKLIDFSAQIAEGMAFIEQRNYIHRDLRAANILVSASLVCKIADFGLARVIEDNEYTAREGAKFPIKWTAPEAINFGSFTIKSDVWSFGILLMEIVTYGRIPYPGMSNPEVIRALERGYRMPRPENCPEELYNIMMRCWKNRPEERPTFEYIQSVLDDFYTATESQYQQQP

SEQ ID NO: 1167 - RNA, 220 nt, Homo Sapiens
ggaaagagaaaagagaaagggggaaggagacggaaaaaagaaagaacaaagaggaaggacaaagagagggagcagggggcgggggcaggaaagggggcacgacgggagcgaaggaggcacgaggcggagaaaaacagggggaacaacagccaagaaaacccaagaacagccaccaacagccggcacccaaaaccaacaggcaaaaaggccggacgaccaa

SEQ ID NO: 1168 - RNA, 49 nt, Homo Sapiens
cgccagagccgcaacaccacaggacccagaaagcagcacggcgagacgc

SEQ ID NO: 1169 - DNA, 6915 bp, Homo Sapiens
cctctgagcccagccctccctagcatcaccacttccatcccattcctcagccaagagccaggaatcctgattccagatcccacgcttccctgcctccctcaggtcccagctcttgctcctgcctgtttgcctggaaatggccacgcttctccttctccttggggtgctggtggtaagcccagacgctctggggagcacaacagcagtgcagacacccacctccggagagcctttggtctctactagcgagcccctgagctcaaagatgtacaccacttcaataacaagtgaccctaaggccgacagcactggggaccagacctcagccctacctccctcaacttccatcaatgagggatcccctctttggacttccattggtgccagcactggttcccctttacctgagccaacaacctaccaggaagtttccatcaagatgtcatcagtgccccaggaaacccctcatgcaaccagtcatcctgctgttcccataacagcaaactctctaggatcccacaccgtgacaggtggaaccataacaacgaactctccagaaacctccagtaggaccagtggagcccctgttaccacggcagctagctctctggagacctccagaggcacctctggaccccctcttaccatggcaactgtctctctggagacttccaaaggcacctctggaccccctgttaccatggcaactgactctctggagacctccactgggaccactggaccccctgttaccatgacaactggctctctggagccctccagcggggccagtggaccccaggtctctagcgtaaaactatctacaatgatgtctccaacgacctccaccaacgcaagcactgtgcccttccggaacccagatgagaactcacgaggcatgctgccagtggctgtgcttgtggccctgctggcggtcatagtcctcgtggctctgctcctgctgtggcgccggcggcagaagcggcggactggggccctcgtgctgagcagaggcggcaagcgtaacggggtggtggacgcctgggctgggccagcccaggtccctgaggagggggccgtgacagtgaccgtgggagggtccgggggcgacaagggctctgggttccccgatggggaggggtctagccgtcggcccacgctcaccactttctttggcagacggaagtctcgccagggctccctggcgatggaggagctgaagtctgggtcaggccccagcctcaaaggggaggaggagccactggtggccagtgaggatggggctgtggacgccccagctcctgatgagcccgaagggggagacggggctgccccttaagtgtcggtgaatagtgaggctggaggccggaatctcagccagcctccagcaccttccctctcaccatcccactgccccctcgctcccatgtttccacccggcaccctgatcctcacccgaatctcctttttttttttcttttgagacagagtttcgctttgtcgcccaggctggagtgcaatgcacgatctcagttcactgcaacctctgcctcctaagttcaggcgattctcctgcctcagcttcccgagtaactgagattacaggcacccaccaccatgcccagctgcttttttgtatttttggtagagatggggtttcaccatgttggctaggctggtctcaaactcctgacctcaggtgatctacctgcctcagcctcccaaagtgctgagattacagacatgagcctccgcgccttgcctcctcacccacctcttcactctgaatcctcatgaggcttctcagccctggatttcctgctgccatcctcacccagcacccacaactagcgcctgggcagggcagggctggcacctctcaacgtctgtggactgaatgaataaaccctcctcatccacccctatttatctccatcaccatttccccctctttcttgttcctggaaacggctgctgagtctccatcggccaaacttatctgccctgtgatttctttgacaattctccttttcccccagaacccaccctgggttgaccagagtctgggaagaaggacaagagaacccggcaaactccctcctaggattaactttgtaaagcacccttgccctgtagctgcaagggctgtggaacctgggcagcccgcaaccacctttagctctgggccccccaggccagcctggagcatggctgggtggggccaccagcccatgctctcaggcgggcctgtgatctttcccagggcacatggactgtaggctggccctggcccacaccaccacactctccccagccatggacagaggcagccagaggcctcacggtttctcctccgagtttctggctgggtgtagttctcagaaaccccagtgcctgcgtgtgtccactcgtgggtgtggtttgtgtgcaagagctgaggatttggcgatgcttgggaggggtagttgtgggtacagacggtgtgggggtgggaagtggtgcagagactgaagagggtcaacctgggcatgggggacacagggactgctgagaacgtgcgtgtcatctttgctctgatggggtggacatagcagaaaatctaactctgtctgtagccccatacagaatgccagggtgagcacagtggctggtgcctttaatcccagcactttggaaagttgaggcaggaggatcgcttgagcccaggagttcgagtctgaagtgagctgtgattgcaccactgcacttcagcctgggcaacagagtgagcccctgtctcaaaaaagaaaagaaaaagaaagccaggcttcatggaaagatcgtatgtgtgacccaaatatgagttcttcagctcagccatggtaatcccttccttgaagtctccatttctgcagtacacatgcatgtgcgctctctctctctctctctctctcacacacacacacacacacacacacacacgcgcgcgcgcgcgcgctctcctgcgaacagaggcagggggagaggggtttgccctggtctcggggactggtctggctggcgcttccccactgcacgtttccaggtttagtttgtctgtgtctcctcttccatcccaggggctgagccccttccatcctccaagaggaaccagtgagagtgagtgaaggaggggcctggagccagggacttcccctgtggggcctgggtggagaggggagaactcaatggtgctgcctttgagaccagcccaggctacagcccaggagcacacatgggccagggcagttggtatttcccgaggacaaagaggaaattttcaaagaggaagttgttgagttagagcttgcggtggctgagagcagacaggttgacctgcaaaaaaagacaggggaggcatgtgagtgtgacagccctgctctgtggcctgggcaggagatgggggaaagggtcaggtgggggatgggctcgtgcagtgggagaggagacggagggagggagcgggaaggggcttgcttagtgggtgggaagagctgagctcggatggaaccagcttctaccagccaggctgggcacccactgggctgcatctggtggccttttctgattgctatttggactcactgcagctgcagaatgacagaggccatgtccaaaatcccttagagacactgttgtcttagagttgttaaaataagagcccccatatcaggtttagaaaatactgtcaccgaacgaacgtcgctgtcctcagctccacctccctttcctttgacagatatggttgttttctaagccaggactggttttagtcaggtcctgggcgaatcctgaaaaaaagaggtagtacgggtaaggaaggcacccaacagggctttcacaatccagaaaatatcaaaatataagtgttaaaagagaggcacaggccgggtgcggtggctcacgcctgtaatctcagcactttgggaggccaaggtgggcagatcatgaggtcaggagtttgagaccagcctggccaatatgatgaaaccccgtttctactaaaaatacaaaagttagccaggcatggtggtgtgctcctgtaatcccagctacttaggaggctgaggccagagaattgcttgaaccctggagtcagaggttgcagtgagccgggatcatgccactgtactccaggctgggtgacaaagtgagactgtctcaaaaaataaaaataaataaaataaataaaagagaggcacaaacagtgttatgaatgcaccaaggaaaatggtgcattcataactctcaggtgaagcctaccaagccatgcgtgtgtgcacatatgtgtgtacgtgtgcatgtgcgtgcgtgcatgtgcgtgcgtgcatgtgcctgtgtgtgtatgtgtgcacatgtgtgtgcgcatgtgtgtgtgtgcgcgcatgtgtgtgtgcatgcatgttctcccatgcatgtgtactgtggcaagggagactttgaggaagagattccagtggctgagcagaagggctcgcattgccctggcgaaaggttggaaggcttcacctgagagtgtgtcgtggcctttgtcatatccactgcttgattcctttctttaaaaattatttttattgttttctacatatgagaaccaccacacctggctaatttttgtattttttgtagagatggggtttcaccatgttgtcccggctggtctcaaactcccgggcacaagagatccacctgcctcagcctcccaaaatgctgggactataggcatgagccactgcacccagccactgcttcattcctggtggctgctgtgcctggcatgttgcagatcctccatgaatatgcatttgaatgaatgaatgaatgaatgaatgaatgaatggagatgacgcctcagagattctttcttttgagatgaggtctcattctgtcacccagactagagggcagtggtgcaatcacagctcaccacagcctcaacctcctgggcctcccaagtagctgcgatcacaggtgtgcaccaacatgcccagctaatttttttttttaatttttaatttgtacagacagggtcttgctgtgttgcccaggctggtctcaaactcctgggctcaagtggtcctcccacctaagcttccccaaatactgggattataggtgtgagccactgtgcccaggcttgcctcagatatttgaaggctgggaaggattttgcaaagctgggaaaaggaaaaggcattcccagcagaggggatagcaggtggaaatacataattaaaaaaaaaaaacgtggagcagatccagcgcagtggctcatgcctgtaatcccagcactttgggaggcagagcagggaggattgcttgagtctaggagttcaagaccagcctgggtaacatagaaagaccctgtctctacaaaaacacaaaaaattagccaggcgtggtggtgcatgcctgtagtaccagctacttgagaagctgaggcaggaggactgcttgaagccaggagtttgagaccagcctgggcaacatagtgagaccccgtgtctacaaaaagtaaacatttatatatatattttttaaagtggagcagttcaatatagagtcttttttgaacaaacgtgaaatagatgtcttttttttttttttgagatggagttttcactcttgttacccaggctggagtgcaatggcgtgatcttggctcaccagaacctccgcctcctgggttcaaacaattctcctgcctcagcctcccaggtagctgggattacaggcatgcaccaccaaacccggataattttgtatttttagtagagatggggtttcaccatgttggtcaagctggtcttgaactcccgacctctgctgatccgtatgcctcggcctcccaaagtgctgggattacatgcgtgagccaccgtgcccgacaatagatgtcttttaattttctggaggaaaaagcaaagcaaaagaagcagtggatattttaagactaaaaaggaaaacaaaaaaaggagatagagcaggccagacgtggtggctcaacgtctgtaatcccagcactttgggaggccgaggcaggtggatcacctgaggtcaggagttcaagaccagcctgaccaacatggtgaaaccctgtttcaaaatacaaaaaattagctgggcgtggtggcgggcacctgtaatcccagctacttgggaggctgaggcaggagaatcccttgaacccaggaggtggaggttgcagtgagccgagatcacgccattgcactccagcctgggcgacaagtaaaaaactccatctcaaaaaaaaaaaaggagatagagcaaggaacagtaagaaaatagttgggtgcagtggctatgcggtggcactataggaggctgaggcgggcagatcacctgaggtcaggagttggagaccagcctgggcaacatagacccctatctctacaaaaaatttgaaatatgaaaaattagccaggtgtagtggtgtgcgcctgtggtaccagctactcaagaggcgaaggcagggaagattgcttgagcccaggagtttgaggctatagtgagctgtgatcatgccactgcactccagcctgggcaatagtgtgagactctgtctcaaaagaaagaacatggccaggcgtggtggctcacacctgtaatcccagcactttgggaggccgaggcagtcagatcatgaggccagtttgaaaccagcctggccaacatggtgaaaccctgtctctactaaaaatacaaaaattagccaggcgtggtggcatgcccccgtaatcccagctacttgggggtctgaggcagaagaattgcttgaaaccgggaggcagaggttgcagtgagccgagatcgtgtcattgcactctagtctgggcgacagagcaagactccgtcttggaaaaaaatttaaaaaaa

SEQ ID NO: 1170 - protein, 400 aa, Homo Sapiens
MATLLLLLGVLVVSPDALGSTTAVQTPTSGEPLVSTSEPLSSKMYTTSITSDPKADSTGDQTSALPPSTSINEGSPLWTSIGASTGSPLPEPTTYQEVSIKMSSVPQETPHATSHPAVPITANSLGSHTVTGGTITTNSPETSSRTSGAPVTTAASSLETSRGTSGPPLTMATVSLETSKGTSGPPVTMATDSLETSTGTTGPPVTMTTGSLEPSSGASGPQVSSVKLSTMMSPTTSTNASTVPFRNPDENSRGMLPVAVLVALLAVIVLVALLLLWRRRQKRRTGALVLSRGGKRNGVVDAWAGPAQVPEEGAVTVTVGGSGGDKGSGFPDGEGSSRRPTLTTFFGRRKSRQGSLAMEELKSGSGPSLKGEEEPLVASEDGAVDAPAPDEPEGGDGAAP

SEQ ID NO: 1171 - DNA, 1901 bp, Homo Sapiens
cgcacttctgactcgagtccccgccgcgcttgtcgtcgccgccgccgggatccgcagccccgcgccatggagccggccgcgggcatccagcgccgcagctcccaggggcccaccgtcccgccgccgccccggggccacgcgccaccggctgccgcccccggcccggccccgctgagctccccggtgcgcgagccgccccagctggaggaggagcggcaggtgcggatcagcgagagcggccagttcagcgacgggctggaggaccgaggcttactagaaagcagcacccgcctgaaacctcacgaagcccagaactacaggaagaaggcattgtgggtgtcctggttctccatcattgtcaccctggccctcgcggtggctgcctttactgtctccgttatgaggtacagcgcctctgcttttgggtttgcatttgatgccatcctggacgtcctgtcatcggcgattgtcctgtggcgttacagcaacgcggccgctgtgcactctgcccatagggagtacatagcctgtgtcatcttgggggtgatattccttctgtcatccatatgtatagtggtcaaagccatccatgacctctcaactaggctgctcccagaagtggacgatttcctgttcagtgtctccattttaagtgggattctttgcagcatcctggccgtgttgaagttcatgctggggaaggttctgaccagtagagcactcataacagatgggtttaactccctcgtgggtggcgtgatgggcttctccattcttctgagcgcggaagtgttcaagcatgactcggcggtctggtacctggacggcagcataggcgttctgatcggcctcaccatatttgcctatggggtcaaactcctcatcgacatggtgccgagggtgaggcagacacgtcactacgagatgtttgagtgaagggggccagcatccgcatgagaccatcgagatgaggagtttccacataggcaaagggtgccaatatttaactgaacatctggtttctttttggaagttttctttcacatggtttgtcattacaagacaaggtctgcccagccaggtggatctaccttgcccccatcacctgccgcccccatcaaacatgttgggacaatgcccataggaatggacctccttccccgtctccagctgggactggcgttttttagtctctggagtatgatggttctcatgggtaggatgagatctttggcagaaaggtcttcggtggtgctctgagcctgcgctgcataggactgagcagacccacctcctccagcttgggtggccctgccactcctggttccaagtctctcctttcctggcaggtcttaagggaagattgtacccctcaccctttacatacccagaatcatcagtatgtcacttcctaatttctatcagtgtatctcattatttcatactgttttactaatcctaagtctaaacagatttgctcaaaaggagaccattctattttttaaagtacttagtgatacacgtataagctttgcatggacgaattaaataagcacattgaccttttcttgtacattcagaacctgaacatccatgtgaaaactgggtccatttttgagagatgtgaaactacagtttatttgtaataaataaatataatctatccgtatatgcatatatctatatgctgtgttaagtggtaatgggtacattacagtctgtgagagatggatcgctccctctgtaaggaacaagacgttctcagctgatgtcacggtaggtttagattctgtagagtgttccccaacccgcaccgttctgtacctctcacaccactgcttgcccgggcagtagtggctgaccaataaagacctttacctgttttgtatggcaaaaaaaaa

SEQ ID NO: 1172 - protein, 289 aa, Homo Sapiens
MEPAAGIQRRSSQGPTVPPPPRGHAPPAAAPGPAPLSSPVREPPQLEEERQVRISESGQFSDGLEDRGLLESSTRLKPHEAQNYRKKALWVSWFSIIVTLALAVAAFTVSVMRYSASAFGFAFDAILDVLSSAIVLWRYSNAAAVHSAHREYIACVILGVIFLLSSICIVVKAIHDLSTRLLPEVDDFLFSVSILSGILCSILAVLKFMLGKVLTSRALITDGFNSLVGGVMGFSILLSAEVFKHDSAVWYLDGSIGVLIGLTIFAYGVKLLIDMVPRVRQTRHYEMFE

SEQ ID NO: 1173 - DNA, 1816 bp, Homo Sapiens
gcctcttccccctcccgcgcgcccgcccgccgcctgccgccgccgccgccgccgccggagctctgtagtatggcatcgaggagaatggagaccaaacctgtgataacctgtctcaaaaccctcctcatcatctactccttcgtcttctggatcactggggtgatcctgctggctgttggagtctggggcaaacttactctgggcacctatatctcccttattgccgagaactccacaaatgctccctatgtgctcatcggaactggcaccactattgttgtctttggcctgtttggatgctttgctacatgtcgtggtagcccatggatgctgaaactgtatgccatgtttctgtccctggtgttcctggctgagctcgtagctggcatttcagggtttgtgtttcgtcatgagatcaaggacaccttcctgaggacttacacggacgctatgcagacttacaatggcaatgatgagaggagccgggcagtggaccatgtgcagcgcagcctgagctgctgtggtgtgcagaactacaccaactggagcaccagcccctacttcctggagcatggcatcccccccagctgctgcatgaacgaaactgattgtaatccccaggatctacacaatctgactgtggccgccaccaaagttaaccagaagggttgttatgatctggtaactagtttcatggagactaacatgggaatcatcgctggagtggcgtttggaatcgcattctcccagttaattggcatgctgctggcctgctgtctgtcccggttcatcacggccaatcagtatgagatggtgtaaggagaagtctttcaagaatgacggaataagagacctgttttaaaaaggaactgcagcaatctttgaaagacttccaaagaatgttagagcacagtacataatacacttgccctgctccctctcccccttaccccacaacgtgcaactgacactcccacccagtctctgctccacctttcagcccacgtcacgtgtagtgtccattttgtgaagccctgttgtgccacagagtgtagccaggtccccctgcagctagtcctagtgaacctcaccccgaggccctgcatgggccagcccctccatctgtacttggtccaactgcaactcatcatcggtgactggttatcacaccatcgctggcccctttgggccctgcatgtagtgtgggaggctcctgttagctcctcactgtggtaaatgccacacacctttaagtagataagcagacgatagttatctgttcttttgacttaatctcatttggtttgattttccctctactaaggctttcctaccttcttcaggctgcctaagacatgtaacgaaacacttcaataattgtccatgaggagaaaaaaagcatgtgtcatgcatgaaggaaactgaacttgaggtggcctccttgcttgttacatacctgggtatgtgtaggcagtttagtgcatctttgcctctcggttgaaacctgtataaccctgttacaaagctgtgttgttgcttcttgtgaaggccatgatattttgtttttccccaattaattgctattgtgttattttactacttctctctgtattttttcttgcattgacattatagacattgaggacctcatccaaacaatttaaaaatgagtgtgaagggggaacaagtcaaaatatttttaaaagatcttcaaaagtaatgcctctgtctagcatgccaacaagaatgcattgatattgtgaacatttgtgatatatgtattaataaatagagcaattacaagcaaaaaaaaaaa

SEQ ID NO: 1174 - protein, 249 aa, Homo Sapiens
MASRRMETKPVITCLKTLLIIYSFVFWITGVILLAVGVWGKLTLGTYISLIAENSTNAPYVLIGTGTTIVVFGLFGCFATCRGSPWMLKLYAMFLSLVFLAELVAGISGFVFRHEIKDTFLRTYTDAMQTYNGNDERSRAVDHVQRSLSCCGVQNYTNWSTSPYFLEHGIPPSCCMNETDCNPQDLHNLTVAATKVNQKGCYDLVTSFMETNMGIIAGVAFGIAFSQLIGMLLACCLSRFITANQYEMV

SEQ ID NO: 1175 - DNA, 2433 bp, Homo Sapiens
atttcacttggaggaaagagagaaggaaggaagctgaggacttagcagggtatcactggacaggccatggctccacggtcccggcgacgaaggcacaagaaacctccctcatcagtggctcccatcatcatggccccaaccacaattgtgacccctgtgcctctgaccccctcaaaacctggccctagcattgacacacttggcttcttctccttggatgataatgttcctggcctatcgcagctgatccttcaaaagctgaacatgaaaagctatgaagaatataagttggtggtagatgggggtacccccgtatcaggctttggatttcgatgtcctcaagaaatgttccagaggatggaagacacatttcgattctgtgctcactgtagagcactccctagtgggctttcagactccaaggttctccggcactgtaagaggtgcagaaatgtctattactgtggtccagagtgccagaagtcagactggcccgcacacaggagggtttgtcaagagcttcgtcttgtggctgtggaccgtctcatggaatggcttctggtcacaggtgattttgttctaccctcaggaccttggccatggccacctgaagctgtacaggactgggactcctggttttctatgaaggggttacacctagatgctacattggatgctgtgctagttagtcatgctgtgaccaccttatgggccagtgtaggacggccaaggccagacccggatgtcctgcagggatctttgaagcggctgctgacagatgtcctgtcacggcccttgactctaggcctaggacttagggccttggggatagatgttaggaggactgggggaagcacagtgcatgtggttggtgcttcccatgtggagacatttcttactcgcccaggggactatgatgagcttggttacatgtttcctgggcaccttggactccgtgtggtcatggtgggtgtagatgtagctactggcttttcacagagcacctcaacttcacccctggaacctggcacaattcagcttagtgcccacaggggcctctaccatgacttctgggaggagcaagtagagaccgggcagacacaccatccagatttggtggcggcattccatccaggttttcattcctccccagacttgatggaggcttggctgcccaccctgctgctacttcgtgactataagattcctacattgattactgtttacagccatcaggagttggtatcctctttgcagattctggtggaactggatacacacatcactgcctttgggtctaatcctttcatgtccctcaaacctgaacaggtctattccagtcccaacaagcagccagtatactgcagtgcatactatatcatgtttcttggaagctcctgtcagctggataataggcaattagaagagaaagtggacggcgggatttaaatagatcataactggacatctggaaaacggggagtttgtgatgaaattaccctgctaatgccaggttcttgcaaactttgaaaaacattatattctaaacctcatttactgtttgggtaaaaattctaagctgaatgagagtttctgtataacataactggtttctttctttttttgagatggagtcttgctctgttgcccaggctggagtgcagcggcatgatctcgactcactgcagcctccgcctcctgggttcaagtggttctcctgcctcagcctccctagtagctgggattacaggtgcacaccaccacacctggctaatttttgtatttttagcagacagggtttcaccatgttggccaggctcgtatcaaacccttgaccccaggtgatctgcctgcctcagcctcccaaagttctgggattacaggcatgagccaccatgcccagccaatgtaactggtttctaagagtttagccacagtagcttctagagataggaaattagatttagtgggtgggaagaggccctgatgctggtctttccagagcttatagttgctaacacttttctttgtaaagaagtttaccttttgactggaaccagatggcactgagaaaaagaatgagaaccaccttattcttctgaaaaagactttcttctcatccagtaatttgggctaaaaaatggaaagatgttgatgacttgaagtgatgcaagaatggacaagtcagggaagtcattgggaacatggatgaggttgtaagcattggtacagtgtcctgtttcctgacttttttgagagaaatgtctacttttcctgttttctcttggggacttttgaccctagagtagccctggtgttatattttagatatcccaagctatatcagactttacctgaatatactggagttacttattatcccccattctataccccaataaactcagtttggggcttcttaaaaaaaaaaaa

SEQ ID NO: 1176 - protein, 10 aa, Artificial Sequence
  Antibody 8G6 Heavy Chain CDR1
SYTFTDYAMH

SEQ ID NO: 1177 - protein, 10 aa, Artificial Sequence
  Antibody 1A8 Heavy Chain CDR1
SYTFTDYTMH

SEQ ID NO: 1178 - protein, 10 aa, Artificial Sequence
  Antibody 2Bl Heavy Chain CDR1
GFTFSRYVMS

SEQ ID NO: 1179 - protein, 7 aa, Artificial Sequence
  Antibody 2AI, Light Chain CDR 2
SASYRYT

SEQ ID NO: 1180 - protein, 10 aa, Artificial Sequence
  Antibody 2Al Heavy Chain CDR1
GYDFNNDLIE

SEQ ID NO: 1181 - protein, 10 aa, Artificial Sequence
  Antibody 2G2 Heavy Chain CDR1
GYAFTNYLIE

SEQ ID NO: 1182 - protein, 17 aa, Artificial Sequence
  Antibody 8G6 Heavy Chain CDR2
VISTYYGNTNYNQKFKG

SEQ ID NO: 1183 - protein, 17 aa, Artificial Sequence
  Antibody 1A8 Heavy Chain CDR2
VIDTYYGKTNYNQKFEG

SEQ ID NO: 1184 - protein, 16 aa, Artificial Sequence
  Antibody 2BI Heavy Chain CDR2
SISSGGSTYYPDSVKG

SEQ ID NO: 1185 - protein, 16 aa, Artificial Sequence
  Antibody 3G9 Heavy Chain CDR2
SISSGGRMYYPDTVKG

SEQ ID NO: 1186 - protein, 17 aa, Artificial Sequence
  Antibody 2AI Heavy Chain CDR2
VINPGSGRTNYNEKFKG

SEQ ID NO: 1187 - protein, 16 aa, Artificial Sequence
  Antibody 2G2 Heavy Chain CDR2
VISPGSGHNYNEKFKG

SEQ ID NO: 1188 - protein, 17 aa, Artificial Sequence
  Antibody 8G6, Heavy Chain CDR3
GGLRRGDRPSLRYAMDY

SEQ ID NO: 1189 - protein, 17 aa, Artificial Sequence
  Antibody 1A8, Heavy Chain CDR3
GGFRRGDRPSLRYAMDS

SEQ ID NO: 1190 - protein, 12 aa, Artificial Sequence
  Antibody 2BI, Heavy Chain CDR3
GAIYDGYYVFAY

SEQ ID NO: 1191 - protein, 12 aa, Artificial Sequence
  Antibody 3G9, Heavy Chain CDR3
GSIYDGYYVFPY

SEQ ID NO: 1192 - protein, 12 aa, Artificial Sequence
  Antibody 2AI, Heavy Chain CDR3
IYYGPHSYAMDY

SEQ ID NO: 1193 - protein, 11 aa, Artificial Sequence
  Antibody 2G2, Heavy Chain CDR3
IDYSGPYAVDD

SEQ ID NO: 1194 - protein, 15 aa, Artificial Sequence
  Antibody 8G6, Light Chain CDR 1
RASQSVSTSSYSYMY

SEQ ID NO: 1195 - protein, 15 aa, Artificial Sequence
  Antibody 1A8, Light Chain CDR 1
RASQSVSISTYSYIH

SEQ ID NO: 1196 - protein, 12 aa, Artificial Sequence
  Antibody 2BI, Light Chain CDR 1
SASSSVSSSYLY

SEQ ID NO: 1197 - protein, 12 aa, Artificial Sequence
  Antibody 3G9, Light Chain CDR 1
SANSSVSSSYLY

SEQ ID NO: 1198 - protein, 11 aa, Artificial Sequence
  Antibody 2AI, Light Chain CDR 1
KASLDVRTAVA

SEQ ID NO: 1199 - protein, 11 aa, Artificial Sequence
  Antibody 2G2, Light Chain CDR 1
KASQAVNTAVA

SEQ ID NO: 1200 - protein, 7 aa, Artificial Sequence
  Antibody 8G6, Light Chain CDR 2
YASNLES

SEQ ID NO: 1201 - protein, 7 aa, Artificial Sequence
  Antibody 2G2, Light Chain CDR 2
SASYQYT

SEQ ID NO: 1202 - protein, 7 aa, Artificial Sequence
  Antibody 2BI and 3G9, Light Chain CDR 2
STSNLAS

SEQ ID NO: 1203 - protein, 9 aa, Artificial Sequence
  Antibody 8G6, Light Chain CDR 3
QHNWEIPFT

SEQ ID NO: 1204 - protein, 9 aa, Artificial Sequence
  Antibody 1A8, Light Chain CDR 3
QHSWEIPYT

SEQ ID NO: 1205 - protein, 9 aa, Artificial Sequence
  Antibody 2BI, Light Chain CDR 3
HQWSSYPPT

SEQ ID NO: 1206 - protein, 9 aa, Artificial Sequence
  AAntibody 3G9, Light Chain CDR 3
HQWSTYPPT

SEQ ID NO: 1207 - protein, 9 aa, Artificial Sequence
  Antibody 2AI, Light Chain CDR 3
QQHYGIPWT

SEQ ID NO: 1208 - protein, 9 aa, Artificial Sequence
  Antibody 2G2, Light Chain CDR 3
QHHYGVPWT

SEQ ID NO: 1209 - protein, 17 aa, Artificial Sequence
  Antibody 8G6, Heavy Chain CDR 3
GGLRRGDRPSLQYAMDY

SEQ ID NO: 1210 - protein, 120 aa, Artificial Sequence
  heavy chain sequence, humanized Antibody
EVQLVESGGGLVQPGGSLRLSCAASGFTFSRYWMSWVRQAPGKGLEWVASISSGGRMYYPDTVKGRFTISRDNAKNSLYLQMNSLRAEDTAVYYCARGSIYDGYYVFPYWGQGTLVTVSS

SEQ ID NO: 1211 - protein, 111 aa, Artificial Sequence
  humanized Antibody, light chain sequence
EIVLTQSPATLSLSPGERATLSCSASSSVSSSSYLYWYQQKPGQAPRLLLIYSTSNLASGIPARRFSGSGSGTDFTLTISSLEPEDFAVYYCHQWSTYPPTFGGGTKVEIK

1. A method for predicting whether a human subject who has an αvβ6-mediated disorder will respond to treatment with an αvβ6-integrin inhibitor, the method comprising:
a) providing a biological sample obtained from the human subject after administration of the αvβ6-integrin inhibitor; and
b) measuring the expression level of a gene or protein from Table 1 or a gene or protein from Table 2 in the biological sample, wherein:
(i) an increase in the expression level of the gene or protein from Table 1 relative to a control expression level; or
ii) a decrease in the expression level of the gene or protein from Table 2 relative to a control expression level,
predicts that the human subject will respond, or has an increased likelihood of responding, to treatment with the αvβ6-integrin inhibitor.

2. The method of claim 1, further comprising determining the phosphorylation status of SMAD2 protein in the biological sample, wherein a decrease in the phosphorylation status of SMAD2 protein after administration of the αvβ6 integrin inhibitor is a further predictor that the human subject will respond, or has an increased likelihood of responding, to treatment with the αvβ6-integrin inhibitor.

3. The method of claim 1, wherein the method comprises measuring any combination of at least 6 genes or proteins from Table 1, Table 2, or Tables 1 and 2.

4. The method of claim 1, wherein a decrease in the expression level of at least one of arachidonate 5-lipoxygenase 5 (ALOX5), fibronectin (FN1), oxidized low density lipoprotein receptor 1 (OLR1), plasminogen activator inhibitor-1 (PAI-1 or SERPINE1), transglutaminase 2 (TGM2), or triggering receptor expressed on myeloid cells 1 (TREM1) in the biological sample is measured and predicts that the human subject will respond, or has an increased likelihood of responding, to treatment with the αvβ6-integrin inhibitor.

5. A method for predicting responsiveness of a human subject to treatment with an inhibitor of a TGF-β-signaling pathway, the method comprising:
(a) measuring the expression level of a gene or protein from Table 1 or a gene or protein from Table 2 in a first biological sample obtained from the human subject before step (b);
(b) administering the inhibitor of a TGF-β-signaling pathway to the human subject; and
(c) measuring the expression level of the gene or protein from Table 1 or the gene or protein from Table 2 in a second biological sample obtained from the human subject after step (b),
wherein an increase in the level of expression of the gene or protein from Table 1 or a decrease in the level of expression of the gene or protein from Table 2 measured in step (c), compared to the level of expression of the gene or protein measured in step (a) predicts that the human subject will respond, or has an increased likelihood of responding, to treatment with the inhibitor of the TGF-β-signaling pathway.

6. A method of treating an αvβ6-mediated disorder in a human subject in need thereof, the method comprising administering to the human subject a therapeutically effective amount of an αvβ6 integrin inhibitor, wherein the human subject has been identified as having at least one of:
(i) a decreased expression level of a gene or protein from Table 1 in a biological sample obtained from the human subject, compared to a control expression level; or
(ii) an increased expression level of a gene or protein from Table 2 in a biological sample obtained from the human subject, compared to a control expression level.

7. A method for predicting whether a human subject who has an αvβ6-mediated disorder will have a clinical response to treatment with an αvβ6-integrin inhibitor, the method comprising:
(a) providing a biological sample obtained from the human subject before treatment with an αvβ6-integrin inhibitor; and
(b) measuring the expression level of a gene or protein from Table 1 or a gene or protein from Table 2,
wherein a subject having
(i) a decreased expression of the gene or the protein from Table 1 relative to a control expression level, or
(ii) an increased expression of the gene or the protein from Table 2 relative to a control expression level,
is predicted to have a clinical response, or have an increased likelihood of a clinical response, to treatment with the αvβ6-integrin inhibitor.

8. A method of treating an αvβ6-mediated disorder in a human subject in need thereof, the method comprising administering to the human subject a therapeutically effective amount of an αvβ6 integrin inhibitor, wherein the human subject has previously been administered the αvβ6 integrin inhibitor and has been identified as having at least one of:
(i) an increased expression level of a gene or protein from Table 1 in a biological sample obtained from the human subject after the previous administration of the αvβ6 integrin inhibitor, compared to a control expression level; or
(ii) a decreased expression level of a gene or protein from Table 2 in a biological sample obtained from the human subject after the previous administration of the αvβ6 integrin inhibitor, compared to a control expression level.

9. The method of claim 1, wherein the biological sample is a bronchoalveolar lavage sample.

10. The method of claim 1, wherein the biological sample is a tissue sample.

11-12. (canceled)

13. The method of claim 1, wherein the αvβ6-mediated disorder is fibrosis, psoriasis, sclerosis, cancer, acute lung injury, acute kidney injury, liver injury, scleroderma, transplant, or Alports Syndrome.

14. The method of claim 1, wherein the αvβ6-mediated disorder is lung fibrosis or kidney fibrosis.

15. The method of claim 1, wherein the αvβ6-mediated disorder is idiopathic pulmonary fibrosis, radiation induced fibrosis, bleomycin induced fibrosis, or asbestos induced fibrosis.

16. The method of claim 1, wherein the αvβ6-mediated disorder is a cancer selected from the group consisting of a pancreatic cancer, a lung cancer, a breast cancer, a prostate cancer, a colorectal cancer, a head and neck cancer, an esophageal cancer, a skin cancer, and an endometrial cancer.

17. The method of claim 1, wherein the αvβ6-integrin inhibitor is an anti-αvβ6-integrin antibody.

18. The method of claim 17, wherein the anti-αvβ6-integrin antibody has the same CDRs as an antibody produced by a hybridoma selected from the group consisting of: 6.1A8 (ATCC accession number PTA-3647); hybridoma 6.3G9 (ATCC accession number PTA-3649); 6.8G6 (ATCC accession number PTA-3645); 6.2E5 (ATCC accession number PTA-3897); 6.2B1 (ATCC accession number PTA-3646); 7.1G10 (ATCC accession number PTA-3898); 7.7G5 (ATCC accession number PTA-3899); and 7.1C5 (ATCC accession number PTA-3900).

19. The method of claim 17, wherein the anti-αvβ6-integrin antibody has the same CDRs as the antibody produced by the hybridoma deposited as 6.3G9 (ATCC accession number PTA-3649), except that the light chain CDR 1 contains an asparagine to serine substitution such that the light chain CDR 1 sequence is the sequence of SASSSVSSSYLY (SEQ ID NO:1196).

20. The method of claim 17, wherein the anti-αvβ6-integrin antibody comprises a heavy chain variable region comprising the amino acid sequence set forth in SEQ ID NO: 1210.

21. The method of claim 20, wherein the anti-αvβ6-integrin antibody further comprises a light chain variable region comprising the amino acid sequence set forth in SEQ ID NO: 1211.

22-23. (canceled)

24. A biomarker panel comprising a probe for each of ALOX5, FN1, OLR1, SERPINE1, TGM2, and TREM1 and no additional genes or proteins other than one or more of the genes or proteins listed in Table 1 and Table 2.

25-27. (canceled)
